United States Patent Application Publication US 2005/0153317 A1 - sequence listing, part 21

SEQ ID NO: 93032 - DNA, 600 bp, Chicken  19866894410910_1
caatgagttttcaacacatttcattgcaaatctccaagcagaagaaaaccagagttgttgttcttctatataataacctcacagttagcttttaaaaatcaaaataagaacatagagctatcatttgttacaagtccacttttcttaaagtccactttgctccaacaagactccgatatggaaagagatgtttgaaggatcaaagtccctgactgtaaaaacacaacattaacacaagttccttacacttggtttatcatagagactcacagaagaaaactgggacagatctgtagacayctttatggtgtggattctggttgtgacacagcagtgaaaagagaccacraagagaaccatgcattccacaaggagttacagatgctctcatagaacgctcaggaagcacagtgagaatcacagctcttatccacatgggttttgaaattctgtagcagaaattatcacagttgaatcaaacaaataacccaacaaccatcaccattgcttctgctatacgttatggatgggtatgttaattgcaaaacaccaacagaacatgcaatttatggttatgcagctattatacagtacagctgg

SEQ ID NO: 93033 - DNA, 600 bp, Chicken  19866894410910_2
cagagttgttgttcttctatataataacctcacagttagcttttaaaaatcaaaataagaacatagagctatcatttgttacaagtccacttttcttaaagtccactttgctccaacaagactccgatatggaaagagatgtttgaaggatcaaagtccctgactgtaaaaacacaacattaacacaagttccttacacttggtttatcatagagactcacagaagaaaactgggacagatctgtagacayctttatggtgtggattctggttgtgacacagcagtgaaaagagaccacraagagaaccatgcattccacaaggagttacagatgctctcatagaacgctcaggaagcacagtgagaatcacagctcttatccacatgggttttgaaattctgtagcagaaattatcacagttgaatcaaacaaataacccaacaaccatcaccattgcttctgctatacgttatggatgggtatgttaattgcaaaacaccaacagaacatgcaatttatggttatgcagctattatacagtacagctggataaacatacacattacacagactatcacagtttaagcctttgttagtc

SEQ ID NO: 93034 - DNA, 599 bp, Chicken  19866894410916_1
  misc_feature (1)..(25): n is any nucleotide
nnnnnnnnnnnnnnnnnnnnnnnnnagttctgtgagtgcgctgataatcgtaaaggatggtgactgatacatttaacatgatttcctcataattttgtgtccagttcttatgcatctctattcacatctgacaagttaccacatagtagcatcaaagataccactgtttcctgtaccttaagtattaatgctcttgatttctcagatataacacaaagataccacagcaaataccacacttttcataccacagatgacaaggacatgcttaagaacaagataaataatacacattttttwaaaacatttccagaaggcctagaatagcagtactatagtctttacaagaccatgctgtgttgtgaagggctttttcttttccatagtgtcatgggaggaacagaccatgccgctggtaatgctacatctttggcagatagtgctgtattctcagtggtagcatactgtttgtgacaggattgagcagcaaaagatagggctcaggctagccacatgattcccatacttacttgggaactgcagtattttgagagtcttaagccagattttgttcctagaatattttcaaagttaacact

SEQ ID NO: 93035 - DNA, 600 bp, Chicken  19866894410940_1
ctcccctacctgatctgccacatagctatatagaattcatccaattaaaaagaaaacaaagaaaaaaaaaaaccaacaaaaaacagcccacaaaccaccacccacaaccaaaacatcattccacgagaattaaaccagggtaacaacatttataatttatattataccccaaataaattacatcccagaatagaacatcatcttctgaaacactgcttagctgagctacagaaattaagatctatttcaagaaacaaacttgtatggaagaagagtctctgaatttgtatgttagaaccraaaaggatcagaatatttttgtctaagagaaccatgaagatctaccaaggcttttattgctacaagtgatcacatttgcacaaaactgcagcaaaaaccaaactgttatttccatcttcaagttgtaaaatcaagcaagaaaataacacaagcagaagagtgtgggataatctaagatttgacaaacttgaaatggtgatatgctttcaataagctgcagaaatagtgtactcctggaaggaaagaacgaaggaaaggtgagagggggaggaggagagaaagacgttttgtttcttacta

SEQ ID NO: 93036 - DNA, 599 bp, Chicken  19866894410942_1
  misc_feature (1)..(223): n is any nucleotide
nnnnnnnnnnnnnnnnnnnnnnnnnnnnnnnnnnnnnnnnnnnnnnnnnnnnnnnnnnnnnnnnnnnnnnnnnnnnnnnnnnnnnnnnnnnnnnnnnnnnnnnnnnnnnnnnnnnnnnnnnnnnnnnnnnnnnnnnnnnnnnnnnnnnnnnnnnnnnnnnnnnnnnnnnnnnnnnnnnnnnnnnnnnnnnnnnnnnnnnnnnnnnnnnnnnnnnnnnnnnnnnttacaaaacagccagtcttctgcgaggacaaattgtgctatttacttctgttctcggaggaaactaatggtgcagcrggtgaaatgtccaggacaataaggagaactggtgytgtgtatccctagctggagaaatatatcttaagtaaattgctctcagctgaaatcatggaatgtcatggaagcagaaagtgatctgtattctgctctttgtgtttcttaagctcagagcctgcccgtggggaggaaaaggaaggcctgggcatcactatgtaaatcattcacttttgcaggggggaatggcaaatggaaaatggatttttattgtatttttcaaatgcagtgtttactctttgttgttaatatatttctctgtt

SEQ ID NO: 93037 - DNA, 599 bp, Chicken  19866894410942_2
  misc_feature (1)..(188): n is any nucleotide
nnnnnnnnnnnnnnnnnnnnnnnnnnnnnnnnnnnnnnnnnnnnnnnnnnnnnnnnnnnnnnnnnnnnnnnnnnnnnnnnnnnnnnnnnnnnnnnnnnnnnnnnnnnnnnnnnnnnnnnnnnnnnnnnnnnnnnnnnnnnnnnnnnnnnnnnnnnnnnnnnnnnnnnnnnnnnnnnnnnnnnnnnnnnttacaaaacagccagtcttctgcgaggacaaattgtgctatttacttctgttctcggaggaaactaatggtgcagcrggtgaaatgtccaggacaataaggagaactggtgytgtgtatccctagctggagaaatatatcttaagtaaattgctctcagctgaaatcatggaatgtcatggaagcagaaagtgatctgtattctgctctttgtgtttcttaagctcagagcctgcccgtggggaggaaaaggaaggcctgggcatcactatgtaaatcattcacttttgcaggggggaatggcaaatggaaaatggatttttattgtatttttcaaatgcagtgtttactctttgttgttaatatatttctctgttttaaatcaagaaggaaagagcaaattataaaggaa

SEQ ID NO: 93038 - DNA, 600 bp, Chicken  19866894410942_3
aaatatatcttaagtaaattgctctcagctgaaatcatggaatgtcatggaagcagaaagtgatctgtattctgctctttgtgtttcttaagctcagagcctgcccgtggggaggaaaaggaaggcctgggcatcactatgtaaatcattcacttttgcaggggggaatggcaaatggaaaatggatttttattgtatttttcaaatgcagtgtttactctttgttgttaatatatttctctgttttaaatcaagaaggaaagagcaaattataaaggaaaaaaaagtaagccagtggamattgcaagtatatctgtgctgtcaacagcttagctccccaattggtccaagtcccagtcccmamgttatcagttaatattcttgggcttgctcagtaaggcttagcttgtttcgaagtacactaaaatccaggttttttttccttctctttgctggctgactctgtgttgtcccgcactgtcccaatgctcttattggcacgctctgttctggtttacacctgctcggagctgctctgctcagcccctgcatttcagatgttctccagactgaaaactcaccgtctccaattcttagaaa

SEQ ID NO: 93039 - DNA, 600 bp, Chicken  19866894410942_4
atctgtattctgctctttgtgtttcttaagctcagagcctgcccgtggggaggaaaaggaaggcctgggcatcactatgtaaatcattcacttttgcaggggggaatggcaaatggaaaatggatttttattgtatttttcaaatgcagtgtttactctttgttgttaatatatttctctgttttaaatcaagaaggaaagagcaaattataaaggaaaaaaaagtaagccagtggamattgcaagtatatctgtgctgtcaacagcttagctccccaattggtccaagtcccagtcccmamgttatcagttaatattcttgggcttgctcagtaaggcttagcttgtttcgaagtacactaaaatccaggttttttttccttctctttgctggctgactctgtgttgtcccgcactgtcccaatgctcttattggcacgctctgttctggtttacacctgctcggagctgctctgctcagcccctgcatttcagatgttctccagactgaaaactcaccgtctccaattcttagaaacacagagaggagatctagaaaatgtatagcccaggtcagggactgtgacatggtggcttcaa

SEQ ID NO: 93040 - DNA, 600 bp, Chicken  19866894410942_5
ctgtattctgctctttgtgtttcttaagctcagagcctgcccgtggggaggaaaaggaaggcctgggcatcactatgtaaatcattcacttttgcaggggggaatggcaaatggaaaatggatttttattgtatttttcaaatgcagtgtttactctttgttgttaatatatttctctgttttaaatcaagaaggaaagagcaaattataaaggaaaaaaaagtaagccagtggamattgcaagtatatctgtgctgtcaacagcttagctccccaattggtccaagtcccagtcccmamgttatcagttaatattcttgggcttgctcagtaaggcttagcttgtttcgaagtacactaaaatccaggttttttttccttctctttgctggctgactctgtgttgtcccgcactgtcccaatgctcttattggcacgctctgttctggtttacacctgctcggagctgctctgctcagcccctgcatttcagatgttctccagactgaaaactcaccgtctccaattcttagaaacacagagaggagatctagaaaatgtatagcccaggtcagggactgtgacatggtggcttcaagt

SEQ ID NO: 93041 - DNA, 600 bp, Chicken  19866894410944_1
gggaaagctgctccggcagctgagcagcagacagctgggggcttttggcaggggtggcagggagtcattcctggcagcagcgagaggatagttctcctccctctgctccgtggtcaggtcagaggtgactccggtgtctggaggaatctgaaggcctcatgctgatcctcccgtccctgcatcagctgccccttgcacatcaaaacccacgtgaataaggagctttgtgttgggtgaggaaagctttctctgcatggtgaggcagatgcttccagcctgcagcacaggcagaaacagcaraactctgcaaagaaaagctgagggctagatatgccactgtgcgagacagctgcacacaatggtgtacagcagtgacacaggaaaacccatggatgcttgggtmagtgaacagaggcacttctgaaggtgcactgtgtgtctgggaaaattatgctgacctgtggtaactcactaatgtcttctgttaactggttgagagtgacctctgatgcatctgtggaggacatctgctggcctctgcgcccaccagccctcacggctctctgcaccaagccaagctatctctcaatggaacaaaac

SEQ ID NO: 93042 - DNA, 600 bp, Chicken  19866894410944_2
tgctccgtggtcaggtcagaggtgactccggtgtctggaggaatctgaaggcctcatgctgatcctcccgtccctgcatcagctgccccttgcacatcaaaacccacgtgaataaggagctttgtgttgggtgaggaaagctttctctgcatggtgaggcagatgcttccagcctgcagcacaggcagaaacagcaraactctgcaaagaaaagctgagggctagatatgccactgtgcgagacagctgcacacaatggtgtacagcagtgacacaggaaaacccatggatgcttgggtmagtgaacagaggcacttctgaaggtgcactgtgtgtctgggaaaattatgctgacctgtggtaactcactaatgtcttctgttaactggttgagagtgacctctgatgcatctgtggaggacatctgctggcctctgcgcccaccagccctcacggctctctgcaccaagccaagctatctctcaatggaacaaaacaggacgagaggatttgccttagctccactcctgcacaaacactctggatgtctgccagtcatcaccaagaaggttgcaagggtattttttctgtcgtatcttt

SEQ ID NO: 93043 - DNA, 600 bp, Chicken  19866894410945_1
cagaatagtatttaactgtaaaactcggaaaattgaagtgctagaaaaacagaattttaagttacggattctgtatcagtgctgtagtagctgccatggttctttgttaaatattactctttagggagtactatttgcttgttaaagacagcttgtgtaacatgaaggaatgctaaatagagagcagcacattcctaaaacttctctttctctgactaattttgtatctgaatggccaccaggtacagtttgtctttgagatctgcaccatcattaaagttagggtttgtaccctagagrcagtggtgtgtcaatcacattggtcctctaatgtaatacatgaggctatgtttccaatgtctgtattcatttatttcagstttcatgatttagcgacagtgcctcattcattacctgtgtttctatggtaaccaaatatcccataatggctctgttacaatgccaaaaatgtttcaatttaagctaatctgttcaattttaggtcattattctgcagtactagcaaggatgatgttatagcttttgggccttttttaggcttattttgttgttgagaaaagaaaaaaaaatagacattaa

SEQ ID NO: 93044 - DNA, 600 bp, Chicken  19866894410945_2
gctgtagtagctgccatggttctttgttaaatattactctttagggagtactatttgcttgttaaagacagcttgtgtaacatgaaggaatgctaaatagagagcagcacattcctaaaacttctctttctctgactaattttgtatctgaatggccaccaggtacagtttgtctttgagatctgcaccatcattaaagttagggtttgtaccctagagrcagtggtgtgtcaatcacattggtcctctaatgtaatacatgaggctatgtttccaatgtctgtattcatttatttcagstttcatgatttagcgacagtgcctcattcattacctgtgtttctatggtaaccaaatatcccataatggctctgttacaatgccaaaaatgtttcaatttaagctaatctgttcaattttaggtcattattctgcagtactagcaaggatgatgttatagcttttgggccttttttaggcttattttgttgttgagaaaagaaaaaaaaatagacattaaaaagatgttgagaataagaagccacgggatgtccacacattcaaaaaaatcttttatagctgtctggcatctaaatcaaa

SEQ ID NO: 93045 - DNA, 599 bp, Chicken  19866894410987_1
  misc_feature (1)..(47): n is any nucleotide
nnnnnnnnnnnnnnnnnnnnnnnnnnnnnnnnnnnnnnnnnnnnnnnacggtgcccgagctgacgcagcagatgttcgactccaagaacatgatggccgcctgcgacccccgccacggccgctacctgacggtggctgccatcttccgaggtcgcatgtccatgaaggaggtggacgagcagatgctgaacgtgcagaacaagaacagcagctactttgtggagtggatccccaacaacgtgaagacggccgtctgcgacatcccccccgcgtggcctcaagatgtccgccaccttcatyggcaacagcacggccatccaggagctcttcaagaggatctcggagcagttcacggccatgttccggcgcaaggccttcttgcactggtacaccggcgagggcatggatgagatggagttcaccgaggcggagagcaacatgaacgacctggtctcagagtaccagcaataccaggatgccaccgctgatgagcagggtgaatttgaagaggaaggagargaggatgaggcatgaagttcccacttatcagaagaacttctctgaagctggcatgtgtatggaatgacttttgatagtag

SEQ ID NO: 93046 - DNA, 600 bp, Chicken  19866894410987_2
tggagtggatccccaacaacgtgaagacggccgtctgcgacatcccccccgcgtggcctcaagatgtccgccaccttcatyggcaacagcacggccatccaggagctcttcaagaggatctcggagcagttcacggccatgttccggcgcaaggccttcttgcactggtacaccggcgagggcatggatgagatggagttcaccgaggcggagagcaacatgaacgacctggtctcagagtaccagcaataccaggatgccaccgctgatgagcagggtgaatttgaagaggaaggagargaggatgaggcatgaagttcccacttatcagaagaacttctctgaagctggcatgtgtatggaatgacttttgatagtagtggtaaagcatgttctttagatgctgtgtacccaattatcctctttgcacttgtaactttgacagattttatcaatgtaactgttctgaatcccaagttattacaatggttttttgtcctttataatgttaagagcacataaaggcatgcattctagattggtttctgtctttcttaactcccccatcagacaaagaacagctatttcttgccccacagg

SEQ ID NO: 93047 - DNA, 600 bp, Chicken  19866894410991_1
aatttatcaggtttagttaactaacctggaaaagaaaggaaaggaggaagaaagaaaacaaagtttctcatcacatttgcttactgcttctaggcagtaaacactcagatttattctgatttataaccttatttccacgtaaggttaataaataagagaaaatatactctccatagagaaaatcattttcctaagataccaatgtgctgtatgcttaacaaaaataagcatataatcaaagttttcccaattttcttcccaggcctacgcttagttcccaaacttcaggaagtgttctgyggtgttcattctccatgtgcatcaattaatagctttgggcagcaaacaccatgtacagatcgagtttcataaacccatttttttaatactgactgcttacgtatgtactgggcaagaagtcaaactgacctgtgtcagtgctggcagagccaccactaaaactgaagaacatccattcaaatccacagaccagtttaacccattgaaacatgttgtgacttcagacagtttttgcataggttaacttaggtgtaggagtattattcagagcatgataagtgctacatgagacaagcttaa

SEQ ID NO: 93048 - DNA, 599 bp, Chicken  19866894411000_1
  misc_feature (1)..(25): n is any nucleotide
nnnnnnnnnnnnnnnnnnnnnnnnnagaaagaaaaggagaaaaagtagttaggagtgggaaagagctgataagatgaaggaaagggggaagccaaaaagcaaagtgacagcaggtactgctatgataaagtagtgtttagcagaggacagtgaaaggaaatgcttggtcctacccctattcatgagggctgcaaagaaaatgataatgtttgttcccaactgccactgaaaccatgtatgttagcagcttgcaaggaagatcagaacagacaggcagcctttactgaaaaaatgacggargtcctacatcacagagcattttatgacaaggctgtttgtaccatatagctccaaagacctaggaaacacccagggaaggaaaaatgagagctgcagacatgtaaatgtccagtatccattttatttacaagtatgataaacaacttccagagaacttggttttgaatagacagaacagtacgtctcagttcatttaattccaaatgggaaacacaaagagtccattgaaaactgaaatacaaagtctaggaaaaaaaaaaaaattaactctccccaattcttaggtttcatttttttag

SEQ ID NO: 93049 - DNA, 600 bp, Chicken  19866894411003_1
tgaactacttcggaattgagcatcttgtagtagaatctggataacaatctaggtatttaaataaacatattaaatattaatttgtatatttatataaatttctaggtgttaagtagcattccataggggaagcttgatgtggaacatgtctagatagtaaagcacagaagtaaaagcagcaggattagcacatggaattaggtttcaatggacattgcattacagtacatgcaaaaaaaataatcacttgattgtcacttacctgtggtttccttgtataatattcacttgttttttttwaataaaaaggagaaatcaagatttcccgtaaacactttgaagaagcttttagaaaagtgaaatcttcagtatcaaaaaaggtaagaacagcttcgggtgtgcgagactgactgcctctctgaaaaggattctctctatttgctagagactggtaggagtacttaaggttgcaaaatacttgcatacgtttcastaactactgccactacctgtttctgcgttaaataagatgtttttcagaagttcagaaatgaaagactccctcttcrtctgcagatagatgatgctttgtggtaaatg

SEQ ID NO: 93050 - DNA, 600 bp, Chicken  19866894411003_2
ggaattaggtttcaatggacattgcattacagtacatgcaaaaaaaataatcacttgattgtcacttacctgtggtttccttgtataatattcacttgttttttttwaataaaaaggagaaatcaagatttcccgtaaacactttgaagaagcttttagaaaagtgaaatcttcagtatcaaaaaaggtaagaacagcttcgggtgtgcgagactgactgcctctctgaaaaggattctctctatttgctagagactggtaggagtacttaaggttgcaaaatacttgcatacgtttcastaactactgccactacctgtttctgcgttaaataagatgtttttcagaagttcagaaatgaaagactccctcttcrtctgcagatagatgatgctttgtggtaaatggattaccacattgccaaggttagcaattagtgcagtaccttgaactttaaattgaagtttctagactagtttttcacctgaccctcacctcttaattgagtattccacaggcataaaagccaaggcattacactttgcccccgctattttcccccaaatggatatgctcctaaaggtgctcagccatctctgc

SEQ ID NO: 93051 - DNA, 600 bp, Chicken  19866894411003_3
ttccttgtataatattcacttgttttttttwaataaaaaggagaaatcaagatttcccgtaaacactttgaagaagcttttagaaaagtgaaatcttcagtatcaaaaaaggtaagaacagcttcgggtgtgcgagactgactgcctctctgaaaaggattctctctatttgctagagactggtaggagtacttaaggttgcaaaatacttgcatacgtttcastaactactgccactacctgtttctgcgttaaataagatgtttttcagaagttcagaaatgaaagactccctcttcrtctgcagatagatgatgctttgtggtaaatggattaccacattgccaaggttagcaattagtgcagtaccttgaactttaaattgaagtttctagactagtttttcacctgaccctcacctcttaattgagtattccacaggcataaaagccaaggcattacactttgcccccgctattttcccccaaatggatatgctcctaaaggtgctcagccatctctgctaaggtgcaaaatacatcattttgagataaggttttctttatgtcctatcatctttgtttttaatcagtcttctaa

SEQ ID NO: 93052 - DNA, 600 bp, Chicken  19866894411003_4
ttgagtattccacaggcataaaagccaaggcattacactttgcccccgctattttcccccaaatggatatgctcctaaaggtgctcagccatctctgctaaggtgcaaaatacatcattttgagataaggttttctttatgtcctatcatctttgtttttaatcagtcttctaaagatttgcatttgtcacggaagtccattttaaaggttatcttatgactagttattttgaaatgaaagttgctctattatcttaataactataattaagataatacagaaattgcttgttaaaagcyctccctgttcaaccaagactgtttatcaaaataaatattttgaaccatcttttaaggtacaaaatamtcatctcccatttccaggtgctatttcttacccattaggtaaattgaatcaagtaaatctctatatactcttgtcaatactgggaaacagctgaatctcactgatttatttctgagtcttttccccactacatacagttgacttactgtgtaattgattgacctgaggctaaccataagttatttttgaagccatatatctactgaatgcagttaactttactaaaagttaac

SEQ ID NO: 93053 - DNA, 600 bp, Chicken  19866894411003_5
tatgctcctaaaggtgctcagccatctctgctaaggtgcaaaatacatcattttgagataaggttttctttatgtcctatcatctttgtttttaatcagtcttctaaagatttgcatttgtcacggaagtccattttaaaggttatcttatgactagttattttgaaatgaaagttgctctattatcttaataactataattaagataatacagaaattgcttgttaaaagcyctccctgttcaaccaagactgtttatcaaaataaatattttgaaccatcttttaaggtacaaaatamtcatctcccatttccaggtgctatttcttacccattaggtaaattgaatcaagtaaatctctatatactcttgtcaatactgggaaacagctgaatctcactgatttatttctgagtcttttccccactacatacagttgacttactgtgtaattgattgacctgaggctaaccataagttatttttgaagccatatatctactgaatgcagttaactttactaaaagttaacatttttaagtattcacttcctcaaaactatcattttgagtgaccagtggaaaggtaaaggaacagtt

SEQ ID NO: 93054 - DNA, 464 bp, Chicken  19866894411003_6
agtaaatctctatatactcttgtcaatactgggaaacagctgaatctcactgatttatttctgagtcttttccccactacatacagttgacttactgtgtaattgattgacctgaggctaaccataagttatttttgaagccatatatctactgaatgcagttaactttactaaaagttaacatttttaagtattcacttcctcaaaactatcattttgagtgaccagtggaaaggtaaaggaacagttactgttaaccaagaccagcaaaagatggtcttgtctgcttatttttggcayaagtggatgagtgacaatctgggagctcccctggcaaaaagaacactagtgttcttgtgatgttctgagactagcacagcaatgggaattagatgaactctgccaaagcctcctgttaactacataccactaactggtatggaaagcctcatttacaagggcag

SEQ ID NO: 93055 - DNA, 553 bp, Chicken  19866894411015_1
ggtttctcatggcctggtggtgatttccttcacaaagtcgatggcagcgggatggaggacacccatgtggggccctggcgatgggggtctgcctcaccccacacagcggggcagccccagcactgctcctggaaaggtctgttccaacctcaatgaccctacgcttccattaggcagctcatagtgcacgtgccagaggaatgaaggagctcctgtcctgggcttgagttggtgtctacaaggactgaaattcccaattcttgttttccagccctttcctgagtctcatccccatcccakaytctgcaggtgtagtgccaggacagcacggacaagtcttgtcctcgcccatatcttcatcctagctgggcaacatgaattataaagcaaaaggtagaagaccacctgcttgtaaagcacccacatggctaccccgacccctctgccagccccccgctgtgggagcacagggccatcccagcccacactaacaccggattatttaaactggaaaactgaacaggcagaacatagacttccccgaaccaaaaaa

SEQ ID NO: 93056 - DNA, 551 bp, Chicken  19866894411015_2
tttctcatggcctggtggtgatttccttcacaaagtcgatggcagcgggatggaggacacccatgtggggccctggcgatgggggtctgcctcaccccacacagcggggcagccccagcactgctcctggaaaggtctgttccaacctcaatgaccctacgcttccattaggcagctcatagtgcacgtgccagaggaatgaaggagctcctgtcctgggcttgagttggtgtctacaaggactgaaattcccaattcttgttttccagccctttcctgagtctcatccccatcccakaytctgcaggtgtagtgccaggacagcacggacaagtcttgtcctcgcccatatcttcatcctagctgggcaacatgaattataaagcaaaaggtagaagaccacctgcttgtaaagcacccacatggctaccccgacccctctgccagccccccgctgtgggagcacagggccatcccagcccacactaacaccggattatttaaactggaaaactgaacaggcagaacatagacttccccgaaccaaaaaa

SEQ ID NO: 93057 - DNA, 600 bp, Chicken  19866894411023_1
gtacattcgtgtttatctataaatatatacaaaagggttcagagagtttgggtgaatcagcagctccacaggcatacatggccataactcacaaatttttgccaaggtccaacagctgcaaggatttggccttgtcaaatttcaacaagcttgtttcatgggacatttgagaggatgaccaggatcttgtttgctttaggtgacttgtgacactgaaaccaaaagtgcaggtaatctaaagagctgctggacacttgaacatatacagacatgactgtagctcatgagttgggatgctgmataacccaagcaagtgcctgtgcaacttcaggttcatagctmtgacaaggcacttaggactgggtctgagtgctccatgtatcacatgggttaacggatgttsatgagratagccatgcctggaccaggtgatagtgctacagacctggcaactgttctagctggctgagtgatacatcctggattatttgcaggtgaatctctgaacaaccgaaagaaaacaaaatatgtttctgcacaggtcagtgaaggccacacaacaaacatttgtgtaggtggatgaatagctgtgcccacaga

SEQ ID NO: 93058 - DNA, 600 bp, Chicken  19866894411023_2
agagtttgggtgaatcagcagctccacaggcatacatggccataactcacaaatttttgccaaggtccaacagctgcaaggatttggccttgtcaaatttcaacaagcttgtttcatgggacatttgagaggatgaccaggatcttgtttgctttaggtgacttgtgacactgaaaccaaaagtgcaggtaatctaaagagctgctggacacttgaacatatacagacatgactgtagctcatgagttgggatgctgmataacccaagcaagtgcctgtgcaacttcaggttcatagctmtgacaaggcacttaggactgggtctgagtgctccatgtatcacatgggttaacggatgttsatgagratagccatgcctggaccaggtgatagtgctacagacctggcaactgttctagctggctgagtgatacatcctggattatttgcaggtgaatctctgaacaaccgaaagaaaacaaaatatgtttctgcacaggtcagtgaaggccacacaacaaacatttgtgtaggtggatgaatagctgtgcccacagacacagacaggacaaggaggaaacatgacttactcatctctac

SEQ ID NO: 93059 - DNA, 597 bp, Chicken  19866894411023_3
aaggtccaacagctgcaaggatttggccttgtcaaatttcaacaagcttgtttcatgggacatttgagaggatgaccaggatcttgtttgctttaggtgacttgtgacactgaaaccaaaagtgcaggtaatctaaagagctgctggacacttgaacatatacagacatgactgtagctcatgagttgggatgctgmataacccaagcaagtgcctgtgcaacttcaggttcatagctmtgacaaggcacttaggactgggtctgagtgctccatgtatcacatgggttaacggatgttsatgagratagccatgcctggaccaggtgatagtgctacagacctggcaactgttctagctggctgagtgatacatcctggattatttgcaggtgaatctctgaacaaccgaaagaaaacaaaatatgtttctgcacaggtcagtgaaggccacacaacaaacatttgtgtaggtggatgaatagctgtgcccacagacacagacaggacaaggaggaaacatgacttactcatctctactgtgcaaaggagtcatctcatcccagtgccattttgttgaggctcatatcagagagaa

SEQ ID NO: 93060 - DNA, 591 bp, Chicken  19866894411023_4
caacagctgcaaggatttggccttgtcaaatttcaacaagcttgtttcatgggacatttgagaggatgaccaggatcttgtttgctttaggtgacttgtgacactgaaaccaaaagtgcaggtaatctaaagagctgctggacacttgaacatatacagacatgactgtagctcatgagttgggatgctgmataacccaagcaagtgcctgtgcaacttcaggttcatagctmtgacaaggcacttaggactgggtctgagtgctccatgtatcacatgggttaacggatgttsatgagratagccatgcctggaccaggtgatagtgctacagacctggcaactgttctagctggctgagtgatacatcctggattatttgcaggtgaatctctgaacaaccgaaagaaaacaaaatatgtttctgcacaggtcagtgaaggccacacaacaaacatttgtgtaggtggatgaatagctgtgcccacagacacagacaggacaaggaggaaacatgacttactcatctctactgtgcaaaggagtcatctcatcccagtgccattttgttgaggctcatatcagagagaa

SEQ ID NO: 93061 - DNA, 600 bp, Chicken  19866894411029_1
atttaggaaaaactgccttgggaataaataaactctcctttcctttctgcaaaggccactatacccccttctggcaataaaacgaggtcttaaagagagtgcaaatttaatgtttgcctttttaaggccctcggtgtaaggtggcctcactgcaaataagcatcaggcccagggcgactcagattatccacaacgccttggagcaaaaaaccagaatggcgtgagggtgtattattcttcagaagatacacaaagcctgccctttggctcacacacactgtttaaagatggtaagctgcrcgaactgaagcacctggaggtggcaatgttgaagctgaagacaaatgctyaaggcttcacacgcggaggcccagagtgggtgcagtggaatcacctggcctgcctgcgtaagcacagagatctgagaggatgtggagaaatggggtctctgccagaacctttagtccctgcccaagtgctcctgggaggcaaagagagcatcagaagagagggtgggccccatgcaaacaatgtgttgctcctggcgtggcctttctcctgtcacaccccatactgcaggtggacaggaagatggggtgc

SEQ ID NO: 93062 - DNA, 600 bp, Chicken  19866894411029_2
aaaggccactatacccccttctggcaataaaacgaggtcttaaagagagtgcaaatttaatgtttgcctttttaaggccctcggtgtaaggtggcctcactgcaaataagcatcaggcccagggcgactcagattatccacaacgccttggagcaaaaaaccagaatggcgtgagggtgtattattcttcagaagatacacaaagcctgccctttggctcacacacactgtttaaagatggtaagctgcrcgaactgaagcacctggaggtggcaatgttgaagctgaagacaaatgctyaaggcttcacacgcggaggcccagagtgggtgcagtggaatcacctggcctgcctgcgtaagcacagagatctgagaggatgtggagaaatggggtctctgccagaacctttagtccctgcccaagtgctcctgggaggcaaagagagcatcagaagagagggtgggccccatgcaaacaatgtgttgctcctggcgtggcctttctcctgtcacaccccatactgcaggtggacaggaagatggggtgcagtggggtgggaattcacaagccaatggctcctcagatgaggtaagaaag

SEQ ID NO: 93063 - DNA, 600 bp, Chicken  19866894411031_1
aaggactgtaggttaggtctgctgccatcctcccagtatttcttagagagtcctagaaacttgaggcgatgcaaggtagctcctaacaggatatcggccaaggtaaagacacatccgcagagccaaagttcacacttctgccctggagaaacaagtgacagaagaggaaggatgagaatagatcctcgggtggatgcttaaaggcttgctcaaaagctccacgaaggcaataggttttggattagactccaaatccttttctgagcattgtgatgtcccaaaagaccagaccttatctgycaggaggccacgtggtgccacaaagctgggaacatgcaacgggcatttacaacccgcatgaagatacaaatcagtatctgcaaaatagctgcattgtggttcagtgaccacttctgctgtgttaatgctcagggagagcaacagcacttgtccttggctgccgctgggcgatgcgagctgcttgagaggtggcatggtaacacgtcctattttagggatgtgagaaaaacttgggaatcaaaaccatttcctggcccagcctggctgctctccctgcatgctgttggggaggtcctgact

SEQ ID NO: 93064 - DNA, 600 bp, Chicken  19866894411039_1
gggtgctcaagcccaatgcacagagcagaaaattaagattgttctcattgctttgctttaaatgtctgtgtcatctataatcagtgaaacagtctgaaacaaagcacagccatctcttttagttatctgagtagcttaagaaaacaaatagtagtgagtagttgttatagttcaaataatctaaatatatttcaaaaattcagtgttagtactttggtaagtgatagatactttaaacgtagaggaaataatgaattttagaataacaatgcaaatgaatttgctgctactattgggatrtgaaaggagaattcttaatagcaattrctaagagaaataggattcactaataagtcttgattcacatgaaggaatcaagatgctggcaacacaaacaatgtagcacaaactcrctcagtattaattcataacatatggtgtacaagcaattattattcaattgcagttgtttactgcatcttatctattaaaaataacctactcagcgatctgttctatttgaaggactgatgtatacagtgtgtaaaatcaaaaaccagtaaaaaaaataacagtatctgttgtgctaacaaatgtaca

SEQ ID NO: 93065 - DNA, 600 bp, Chicken  19866894411039_2
gaaaattaagattgttctcattgctttgctttaaatgtctgtgtcatctataatcagtgaaacagtctgaaacaaagcacagccatctcttttagttatctgagtagcttaagaaaacaaatagtagtgagtagttgttatagttcaaataatctaaatatatttcaaaaattcagtgttagtactttggtaagtgatagatactttaaacgtagaggaaataatgaattttagaataacaatgcaaatgaatttgctgctactattgggatrtgaaaggagaattcttaatagcaattrctaagagaaataggattcactaataagtcttgattcacatgaaggaatcaagatgctggcaacacaaacaatgtagcacaaactcrctcagtattaattcataacatatggtgtacaagcaattattattcaattgcagttgtttactgcatcttatctattaaaaataacctactcagcgatctgttctatttgaaggactgatgtatacagtgtgtaaaatcaaaaaccagtaaaaaaaataacagtatctgttgtgctaacaaatgtacattagttctccaccattctcctggttta

SEQ ID NO: 93066 - DNA, 600 bp, Chicken  19866894411039_3
ctcttttagttatctgagtagcttaagaaaacaaatagtagtgagtagttgttatagttcaaataatctaaatatatttcaaaaattcagtgttagtactttggtaagtgatagatactttaaacgtagaggaaataatgaattttagaataacaatgcaaatgaatttgctgctactattgggatrtgaaaggagaattcttaatagcaattrctaagagaaataggattcactaataagtcttgattcacatgaaggaatcaagatgctggcaacacaaacaatgtagcacaaactcrctcagtattaattcataacatatggtgtacaagcaattattattcaattgcagttgtttactgcatcttatctattaaaaataacctactcagcgatctgttctatttgaaggactgatgtatacagtgtgtaaaatcaaaaaccagtaaaaaaaataacagtatctgttgtgctaacaaatgtacattagttctccaccattctcctggtttaatattcctttgtcgctagcttcctatcacaacatgagatcacatgtattcctttccattttggtcaccatgcttcagtagacatca

SEQ ID NO: 93067 - DNA, 600 bp, Chicken  19866894411040_1
ctgacatttcttgtcctaatcataaggcatttgtagagtagttttattatggtacattttccaattatctttttggcatttgtttgctacttaactaagctaagtaagaagtcttccttgaagaagtactgctataaccaatgtgcccatacgataacgtagccagcacaatctggaggaggtgggcttgctgcatttcagttgggaaagactctgaatgagtttcctgctgttcctgcattaacttgtctggtttgagtttgctattcagactggtgatcagcctgaaatagcctttgraaaaaacaacagcaaaaaaacaacacttaagcactaaattccttctgtgctagacagaaggtgcttgccttggatcctggtcctgacaggttgctctctcttcttcctttttggtgatgttctttgtatagcagttaagtggacacaacttcttttaaggaaatcaaccactcaggcaagtggtagtcagccagaagatgaattatgagtagacgccaatatagggtaatcttcagccagctgccagattagtgatgtgtcaggagggcaggggaaggggaagaaggtcttgccagaggt

SEQ ID NO: 93068 - DNA, 600 bp, Chicken  19866894411040_2
ccaatatagggtaatcttcagccagctgccagattagtgatgtgtcaggagggcaggggaaggggaagaaggtcttgccagaggtcacagtgcctgctgattgctaaagaagatagttgatagcagttgaatacaaggagccttgaggatgcagaaatgcctccaaggatctggcagctgaggctcatctctctctaggctatcaccaatgtgaatccaggatagcttcgaaagaaattgcgctgaccttggtagaaaccaagctcttaaaatagtgaatgaccttcttgatgtagatamctataatttcaaaacaaatggytcctccatggcattgygtgggcttgtgcaaggaacacaaaagcctaatactatgatatatttgtaatgataacataaagggacatccagaacactacagaacaaaatggagaagactcaccttctcttctccacagtttgttactggatcaaaaaatatttaagacatgagaaaaatcttgctaagcaagacatggcacctgcagagaaagagcacacaaatctgtctatagggtcgcatcacaatatgctgaggactcctgccaagatatgttgtgg

SEQ ID NO: 93069 - DNA, 600 bp, Chicken  19866894411040_3
cagctgccagattagtgatgtgtcaggagggcaggggaaggggaagaaggtcttgccagaggtcacagtgcctgctgattgctaaagaagatagttgatagcagttgaatacaaggagccttgaggatgcagaaatgcctccaaggatctggcagctgaggctcatctctctctaggctatcaccaatgtgaatccaggatagcttcgaaagaaattgcgctgaccttggtagaaaccaagctcttaaaatagtgaatgaccttcttgatgtagatamctataatttcaaaacaaatggytcctccatggcattgygtgggcttgtgcaaggaacacaaaagcctaatactatgatatatttgtaatgataacataaagggacatccagaacactacagaacaaaatggagaagactcaccttctcttctccacagtttgttactggatcaaaaaatatttaagacatgagaaaaatcttgctaagcaagacatggcacctgcagagaaagagcacacaaatctgtctatagggtcgcatcacaatatgctgaggactcctgccaagatatgttgtggtagttctagcatttctagcctt

SEQ ID NO: 93070 - DNA, 600 bp, Chicken  19866894411040_4
gatgtgtcaggagggcaggggaaggggaagaaggtcttgccagaggtcacagtgcctgctgattgctaaagaagatagttgatagcagttgaatacaaggagccttgaggatgcagaaatgcctccaaggatctggcagctgaggctcatctctctctaggctatcaccaatgtgaatccaggatagcttcgaaagaaattgcgctgaccttggtagaaaccaagctcttaaaatagtgaatgaccttcttgatgtagatamctataatttcaaaacaaatggytcctccatggcattgygtgggcttgtgcaaggaacacaaaagcctaatactatgatatatttgtaatgataacataaagggacatccagaacactacagaacaaaatggagaagactcaccttctcttctccacagtttgttactggatcaaaaaatatttaagacatgagaaaaatcttgctaagcaagacatggcacctgcagagaaagagcacacaaatctgtctatagggtcgcatcacaatatgctgaggactcctgccaagatatgttgtggtagttctagcatttctagccttttggaagtataagtct

SEQ ID NO: 93071 - DNA, 599 bp, Chicken  19866894411041_1
  misc_feature (1)..(251): n is any nucleotide
nnnnnnnnnnnnnnnnnnnnnnnnnnnnnnnnnnnnnnnnnnnnnnnnnnnnnnnnnnnnnnnnnnnnnnnnnnnnnnnnnnnnnnnnnnnnnnnnnnnnnnnnnnnnnnnnnnnnnnnnnnnnnnnnnnnnnnnnnnnnnnnnnnnnnnnnnnnnnnnnnnnnnnnnnnnnnnnnnnnnnnnnnnnnnnnnnnnnnnnnnnnnnnnnnnnnnnnnnnnnnnnnnnnnnnnnnnnnnnnnnnnnnnnnnnnttgattcagcatgtgtaaagtatgtatacacacagtgtgatagcccccmcatatatatatatatatatatatatttaaagaagcccagctgcacagaatggttagcattagcataagataaaaaaaaatccatactttcatctgttctaaacgttctatgtgttatgtaggtcatacttcaacagattaaattaattgttttactactagtttataactatagtctctgattatttccaaatatatacttttttcagaataaagatgaacagaggtaataaacccatttacaaatagaagtgagcaacacaaagaaaaatttaaaatatccaataattcctattgcca

SEQ ID NO: 93072 - DNA, 600 bp, Chicken  19866894411057_1
aaatagtctttgccaaaaaaagaatctctatttagtagtgtccattacattgtgccttttgtctgagcgtgtgcttgaattgttaacacactgggctattcttgttcacggataaagaagctgcagttactgtttctaaacattattttctcaaacaagggtttggaaagaaattcagagggctcacatcctttttgtgatttcagaaatgagagggagtgtttatctaaggaaatatagctgaagctttggtatgtacatatttgcttcctgtaagaagagaacaccttatttttgtarattgggaaattttccacatccttcttaaaacagttctcatttttatccagtgttttacttggaatgcttttgcagtgstatataaagcagtgcatatagttgtctcatcaggtttatttatgtcgaactgcagtatagatgacgtttttctcccagaatagttgagagcagcaaatcctgyatttgaaatggagcgtaggttcattgtttttcttataactgggaatgtggttgtggtttgtgaagagctgcctaaattgcacctaggggaggctgaactcggtgtttgtcttgttgcag

SEQ ID NO: 93073 - DNA, 600 bp, Chicken  19866894411057_2
attgttaacacactgggctattcttgttcacggataaagaagctgcagttactgtttctaaacattattttctcaaacaagggtttggaaagaaattcagagggctcacatcctttttgtgatttcagaaatgagagggagtgtttatctaaggaaatatagctgaagctttggtatgtacatatttgcttcctgtaagaagagaacaccttatttttgtarattgggaaattttccacatccttcttaaaacagttctcatttttatccagtgttttacttggaatgcttttgcagtgstatataaagcagtgcatatagttgtctcatcaggtttatttatgtcgaactgcagtatagatgacgtttttctcccagaatagttgagagcagcaaatcctgyatttgaaatggagcgtaggttcattgtttttcttataactgggaatgtggttgtggtttgtgaagagctgcctaaattgcacctaggggaggctgaactcggtgtttgtcttgttgcagtccatggcgttgtactggttgtcctcaagcttcatgggactctctcacaacctgttgctccgttctccgaccgttcgt

SEQ ID NO: 93074 - DNA, 600 bp, Chicken  19866894411057_3
gctcacatcctttttgtgatttcagaaatgagagggagtgtttatctaaggaaatatagctgaagctttggtatgtacatatttgcttcctgtaagaagagaacaccttatttttgtarattgggaaattttccacatccttcttaaaacagttctcatttttatccagtgttttacttggaatgcttttgcagtgstatataaagcagtgcatatagttgtctcatcaggtttatttatgtcgaactgcagtatagatgacgtttttctcccagaatagttgagagcagcaaatcctgyatttgaaatggagcgtaggttcattgtttttcttataactgggaatgtggttgtggtttgtgaagagctgcctaaattgcacctaggggaggctgaactcggtgtttgtcttgttgcagtccatggcgttgtactggttgtcctcaagcttcatgggactctctcacaacctgttgctccgttctccgaccgttcgtcgactgtgttgcataccgaggaccaaatctgactcagatactccttacagggatattgtgtctgccttgactaccaagtacagttttaagaaataatgtgctt

SEQ ID NO: 93075 - DNA, 599 bp, Chicken  19866894411058_1
  misc_feature (1)..(91): n is any nucleotide
nnnnnnnnnnnnnnnnnnnnnnnnnnnnnnnnnnnnnnnnnnnnnnnnnnnnnnnnnnnnnnnnnnnnnnnnnnnnnnnnnnnnnnnnnnnttgggttaagaccaacttactatgctattgccttatgaaggctttttaatatattactcattaatttttaatccagactctgaaatgatacagtcacagaagcagaaaacacacagctacatgcacacctgtgaagacaagccataggaagagaacttcatcagtgacaaaacgggcaattacttcaggctctgacaagtaggaaaacytgaaaattgaggaatccttacagagaactcactccatctagctgtgctgcaaataaatcaagggacaagaatcactcatggcactggcagagcagaagttacagtgttagaaaagtacaaatgtcacacttggagcaacagatctcaatccaactaaatgagtatgagaccagcagtggagaaatcaccatttggatatctgaccgctctaactgtcaagcaagagtaatgatcattaatatataattaaaagacaacaaccatttggggatagaagcaggtagcagggatggatgctg

SEQ ID NO: 93076 - DNA, 600 bp, Chicken  19866894411060_1
cttaggtaggaatactcagagatgtgcccatactggaagggatttgccttatcctaatagcaatatttagactgaggttatcaggcatggattacagaagatgtggctaagtaaaaggttactctgaagttatttttgaataccttattcagtctgtggctggagggagttcttcacctgagccattacttcctcaggagattcagggcaagcacacagtaggtggctgtaagagctgtactggatccaagagagcaaatttgattgtgatgcttggatctatatttgtacacaaaaaartggactgagatttatagtttctccctcacaggatgggattgaatttcagtacactcttagaaaaggaagctatggctgaatctatgattcatccaaagaagagatgaataaacccagtatacagaggtagaagcagctgaagattaaaaactccattagtctgctggaatttggcacagataaagcacttgagggctgaaagttaagtatctctgtgaacatttaaaggaggatacatctaaaattgcctctaaaattgaagaaggccctaaacacttcagagaaggcatccagaagaag

SEQ ID NO: 93077 - DNA, 599 bp, Chicken  19866894411069_1
  misc_feature (1)..(80): n is any nucleotide
nnnnnnnnnnnnnnnnnnnnnnnnnnnnnnnnnnnnnnnnnnnnnnnnnnnnnnnnnnnnnnnnnnnnnnnnnnnnnnnncctggtgtgggagagactgactctttcaatgtacttctcatcttcaatgacagcacaaactacaacaaaaggcacacctgagttacctcatcgaatccaaccaatccagttatgagtcacacctcatacaagtgttacaactcaagacgaatgcaattcatatcaaattattccccatgtcattcaataaaccccatatttttaagtttacctaaatcgyttcctaattctcagttgctgaagcatagttttaagactctggaatccttgacttgttatttaattcaagctggctttgcagagaattctatcccaaaactcccaacaaagtaagaaaaaacctctgtaaggctgtagcttttcagagtgctttgcatttttacggccattctggagaccacaaagtgtacaaagattattattattactgaacaaatggtgtgaaaatcttaatattatttctgacctgtttccacctaytcaagttttatgatgtgttggattcattttataccctcg

SEQ ID NO: 93078 - DNA, 600 bp, Chicken  19866894411069_2
cattcaataaaccccatatttttaagtttacctaaatcgyttcctaattctcagttgctgaagcatagttttaagactctggaatccttgacttgttatttaattcaagctggctttgcagagaattctatcccaaaactcccaacaaagtaagaaaaaacctctgtaaggctgtagcttttcagagtgctttgcatttttacggccattctggagaccacaaagtgtacaaagattattattattactgaacaaatggtgtgaaaatcttaatattatttctgacctgtttccacctaytcaagttttatgatgtgttggattcattttataccctcgcatggttccataaaaaataatgctaaattactactagaggacaatgctacttgtaatgagcttgaggctagcccagatttaaatctaggatattatggcagggaagtgggatggaacagcagagaggcagtgaagcaagtatttaatatttgaggaacttgacactgttctactgcaaaaataatcactttgcactactgacttcagcagagctgcytgctgcatgcagatgagcaacgtgcctgaatgctcaatgttccc

SEQ ID NO: 93079 - DNA, 600 bp, Chicken  19866894411069_3
tggtgtgaaaatcttaatattatttctgacctgtttccacctaytcaagttttatgatgtgttggattcattttataccctcgcatggttccataaaaaataatgctaaattactactagaggacaatgctacttgtaatgagcttgaggctagcccagatttaaatctaggatattatggcagggaagtgggatggaacagcagagaggcagtgaagcaagtatttaatatttgaggaacttgacactgttctactgcaaaaataatcactttgcactactgacttcagcagagctgcytgctgcatgcagatgagcaacgtgcctgaatgctcaatgttccccctgactaactgaaaggatttgcaagctaccaaacaatagatactgacagatttaacagttcacagaagctaagcttctgttttctcttaatgtaacaaagcattatccttggctacaaacatgactgcactttcagcttaaatacctcaaaagcagaaagttaactcatatagagaattttaatgatcatcacaaagcaggagggttgaactagatgaccttttgaggtcccttccaacccaagccattctatga

SEQ ID NO: 93080 - DNA, 600 bp, Chicken  19866894411071_1
ttcctggagcaggtcactggtttctgtgtatgatggcatgttcctttaacatttgagtcatagaatcattaaggttcatccaatccaaccatcagcccatccccaccatgctcactgaccatgtccctcagtgccacatccacacggttcttgaactcctccagggatggtgacttcaccacctccctgggcagcctgtgacactgcaacatcactctttcagagaagaaatgtttcctaatatccaacgtgaacctcctctggcactagctgaggccactgcctctcatctatttgccycctcttggagtaatgatgttactaccaataggaggaagtccacaggaatgggactttaaccatactccttactcacatgggagacaggaaccactgcaggctttgcgggtggaaaccaaagacaaatttcatttcttcaactcagcattccttaaatagctctttgggaatatacaggctgtctcaagcaatagtatcctattgcctattccaaagttttgttacagaagtgagaggaagacagactttttgaggctgttattcctcctgcctgattgtatgaaaggggccatggaccca

SEQ ID NO: 93081 - DNA, 600 bp, Chicken  19866894411075_1
ggtgatgtttagatgtgtgcggtagcgcagaccataagccaggaagccctctgactgcaggagtcctgctggctgtgcaggagcagctctcagcagcagtgagtgacaggaacccttgctcctgcagcagggttggaggagctgcaggcttccctccatctccccaggagcatcgggagcagctcaaccccctgctcttggttggtcatcttcagactgggatttccactcagaagtcggtaagcattcttcctagagagtggggagcaggtggggacaggtgctgagtgggagggaacygagggcagccagcttcagccttggctgaatcagaggagcacatcccctcccctcctcagctgctgcagggagtgttgccctgcttcacgctgcctgaaccactggataatagccccctaatacctktagattgctatccaaatacactatcggggcatattgtcctaatttctgttaacagtctgcatcctaccagtattactcgtatgagagcttcactgagttacgcatcgaaccattcagactttagaaaggacacagtcacatcttttatcatctaggagctggaatgactttgta

SEQ ID NO: 93082 - DNA, 600 bp, Chicken  19866894411075_2
gcagggttggaggagctgcaggcttccctccatctccccaggagcatcgggagcagctcaaccccctgctcttggttggtcatcttcagactgggatttccactcagaagtcggtaagcattcttcctagagagtggggagcaggtggggacaggtgctgagtgggagggaacygagggcagccagcttcagccttggctgaatcagaggagcacatcccctcccctcctcagctgctgcagggagtgttgccctgcttcacgctgcctgaaccactggataatagccccctaatacctktagattgctatccaaatacactatcggggcatattgtcctaatttctgttaacagtctgcatcctaccagtattactcgtatgagagcttcactgagttacgcatcgaaccattcagactttagaaaggacacagtcacatcttttatcatctaggagctggaatgactttgtaggcccatttcaaatgcagaaagtaaagttaactcttggttgtttggggagggaaggaggcttctcacagaggttgccaccctacaactgtgttctgtttagttttgttttcttttcttaaaactgt

SEQ ID NO: 93083 - DNA, 599 bp, Chicken  19866894411102_1
  misc_feature (1)..(110): n is any nucleotide
nnnnnnnnnnnnnnnnnnnnnnnnnnnnnnnnnnnnnnnnnnnnnnnnnnnnnnnnnnnnnnnnnnnnnnnnnnnnnnnnnnnnnnnnnnnnnnnnnnnnnnnnnnnnnnggcctaggagatgttcaatattcctgtcaatttacatggtcaagtcactttccttattcagttgttcaaatggtgatggctttgagtaagactaacaaaaaactgggtcaggaaggaggaaggattaaacaacacaatcattacttccaggaatcttatttctggtggaaaacactgtccactgtcccaygcaagacrtctctaaattcataatttatgaacttaagaagtcagaaagcatccccatgtagggaaaatggtggtattttataataggaacatacaactctgggaattgattactgccaccatccttacccaacaaaaatatagggaaaaataaaggtatggtgtttccttttatccaacggttagcatctgatatgagggatgtaaatcccttttcctcctgtgatgatccagatcaataaatatttggaggagtaatgccatttgtgataccatatttttcagattctctgaattttt

SEQ ID NO: 93084 - DNA, 599 bp, Chicken  19866894411102_2
  misc_feature (1)..(102): n is any nucleotide
nnnnnnnnnnnnnnnnnnnnnnnnnnnnnnnnnnnnnnnnnnnnnnnnnnnnnnnnnnnnnnnnnnnnnnnnnnnnnnnnnnnnnnnnnnnnnnnnnnnnnnggcctaggagatgttcaatattcctgtcaatttacatggtcaagtcactttccttattcagttgttcaaatggtgatggctttgagtaagactaacaaaaaactgggtcaggaaggaggaaggattaaacaacacaatcattacttccaggaatcttatttctggtggaaaacactgtccactgtcccaygcaagacrtctctaaattcataatttatgaacttaagaagtcagaaagcatccccatgtagggaaaatggtggtattttataataggaacatacaactctgggaattgattactgccaccatccttacccaacaaaaatatagggaaaaataaaggtatggtgtttccttttatccaacggttagcatctgatatgagggatgtaaatcccttttcctcctgtgatgatccagatcaataaatatttggaggagtaatgccatttgtgataccatatttttcagattctctgaatttttggtcttcc

SEQ ID NO: 93085 - DNA, 600 bp, Chicken  19866894411109_1
gaatagtaagttaatttttacaaagcagttgtgtttagaagagaatgcgaagtccaggcagggggtaccactgtttttcagtgatggtcaacaaactgaatgcaatatggcattaaaggaaatagaatttggtaatatgagaagctgaagtaagtgaactccgtaattcagatcactttgtgtaataggaagacgttatatggtggttctgttaacatctttattgatgcatgatgtttaagtggtttacacacatttaatgaaacctcgtgatatttttatgcaataggcaggatttcrtttcaagataggttataatgctttttaggcaaggctgtgtgcattttctaccttgcagaggaccagacacatcagtagaagtgaagctgctgctctcatagggccatgggaagtaaagtgctgtatgtgctcatccagtaagttacaaccagtcaagrcagtgggatcctatggatttaacagcctcagggtcagtgctgggcagmagggagttctaggcatacacatgccctggattcacatggaagaaattcatagcaaaacttctgtatagagacactgattgaccgtggttagtac

SEQ ID NO: 93086 - DNA, 600 bp, Chicken  19866894411109_2
ctccgtaattcagatcactttgtgtaataggaagacgttatatggtggttctgttaacatctttattgatgcatgatgtttaagtggtttacacacatttaatgaaacctcgtgatatttttatgcaataggcaggatttcrtttcaagataggttataatgctttttaggcaaggctgtgtgcattttctaccttgcagaggaccagacacatcagtagaagtgaagctgctgctctcatagggccatgggaagtaaagtgctgtatgtgctcatccagtaagttacaaccagtcaagrcagtgggatcctatggatttaacagcctcagggtcagtgctgggcagmagggagttctaggcatacacatgccctggattcacatggaagaaattcatagcaaaacttctgtatagagacactgattgaccgtggttagtacatttatcttctggcttctgcaggattggatttaaattacaaatgggtcagcagtggataatttagttcagtggtcatttggattatcatctccatcatgaagcagtcatatatcatggaggcagctggcagctttgctcagtgttggtctcatttttg

SEQ ID NO: 93087 - DNA, 600 bp, Chicken  19866894411109_3
ttctgttaacatctttattgatgcatgatgtttaagtggtttacacacatttaatgaaacctcgtgatatttttatgcaataggcaggatttcrtttcaagataggttataatgctttttaggcaaggctgtgtgcattttctaccttgcagaggaccagacacatcagtagaagtgaagctgctgctctcatagggccatgggaagtaaagtgctgtatgtgctcatccagtaagttacaaccagtcaagrcagtgggatcctatggatttaacagcctcagggtcagtgctgggcagmagggagttctaggcatacacatgccctggattcacatggaagaaattcatagcaaaacttctgtatagagacactgattgaccgtggttagtacatttatcttctggcttctgcaggattggatttaaattacaaatgggtcagcagtggataatttagttcagtggtcatttggattatcatctccatcatgaagcagtcatatatcatggaggcagctggcagctttgctcagtgttggtctcatttttggtagaagctggtggttttgggaactggagtgaagagatttggcagtgt

SEQ ID NO: 93088 - DNA, 600 bp, Chicken  19866894411111_1
aatgtccatttttaataattttgttttgcaagccaagtacttaatgagcagtgtacttcttgcaacaaacgcatgtgtttgttgtgaattgcacagcttactgaaaataagtttgttggccaacagatgcaaatgagacgtacaagaatgcatagttgcttgcgttcagcagatttgtagggtgattcaaatagttgctgattagtattggctactaacatttggtcacactcaagccttggaaagagtcctattcaacaaacaccaggcatcatctcaagggatgcaacagaatgattyctaacagctaacattacatttagtagcagtaaacatttgttttaacttgatatgttgtcaaatattattacttatcttcaaaatactgaactaaatttggattaggtgactgtgtgctattagttccctttttctttacatcagattcagagactgtagaggccttcaatacctgctcacaacccagatggatgaagtaaagaagttccagaagattgtaagagaagcaagtgaaaaacttagaaggccctccctcaaaggaggttattgaggctgccactatctgccacttgcgacctg

SEQ ID NO: 93089 - DNA, 600 bp, Chicken  19866894411112_1
tgagagcccttttgtattgtactgcaatacaagtttaaattaaacttcagtaactgcctttgcttccattttgtccggagttcaacctgatgcacagtgcaacttttgaaatgtgtatgtcccacttactttttttcttctgttttttttctatgacttttgttcacagtttacatgaacttgtgaaacacaatgaaaatgggctgatattcagggattcacatgaacttgcagaacaactgaaggtaaaggcgtaagagattattctttcctactagctttaaccacagaagtgttacwgtgtgagctacatcattcttgtgtgacgatcatckgtgtattttgcattctcagagrgcactgctttgcctggtgggtcttattggccacatttctatttgaataaaaatctaaagctgtcaagaacatactaaatatttcaatattgaactatgtagagggtaagaccaaagatcccattcttactgcaacactaaagtcaagggttagcactgggaaaagctagaatttatccaaaatagaatacaatggtatttttctgtgttattttttttttaccttacagatgcttttcttggg

SEQ ID NO: 93090 - DNA, 600 bp, Chicken  19866894411112_2
taaattaaacttcagtaactgcctttgcttccattttgtccggagttcaacctgatgcacagtgcaacttttgaaatgtgtatgtcccacttactttttttcttctgttttttttctatgacttttgttcacagtttacatgaacttgtgaaacacaatgaaaatgggctgatattcagggattcacatgaacttgcagaacaactgaaggtaaaggcgtaagagattattctttcctactagctttaaccacagaagtgttacwgtgtgagctacatcattcttgtgtgacgatcatckgtgtattttgcattctcagagrgcactgctttgcctggtgggtcttattggccacatttctatttgaataaaaatctaaagctgtcaagaacatactaaatatttcaatattgaactatgtagagggtaagaccaaagatcccattcttactgcaacactaaagtcaagggttagcactgggaaaagctagaatttatccaaaatagaatacaatggtatttttctgtgttattttttttttaccttacagatgcttttcttgggatttcccacgctggaaggcaaactccaagagttca

SEQ ID NO: 93091 - DNA, 600 bp, Chicken  19866894411112_3
ctttgcttccattttgtccggagttcaacctgatgcacagtgcaacttttgaaatgtgtatgtcccacttactttttttcttctgttttttttctatgacttttgttcacagtttacatgaacttgtgaaacacaatgaaaatgggctgatattcagggattcacatgaacttgcagaacaactgaaggtaaaggcgtaagagattattctttcctactagctttaaccacagaagtgttacwgtgtgagctacatcattcttgtgtgacgatcatckgtgtattttgcattctcagagrgcactgctttgcctggtgggtcttattggccacatttctatttgaataaaaatctaaagctgtcaagaacatactaaatatttcaatattgaactatgtagagggtaagaccaaagatcccattcttactgcaacactaaagtcaagggttagcactgggaaaagctagaatttatccaaaatagaatacaatggtatttttctgtgttattttttttttaccttacagatgcttttcttgggatttcccacgctggaaggcaaactccaagagttcaggaaaaaccttcgtgcatccaa

SEQ ID NO: 93092 - DNA, 600 bp, Chicken  19866894411114_1
ctcttggtccctagacatttttcagacggttctgtacttttctctggaagggaagtgtgtggggaaggtgctgtatttctttttctttggttaatgtctttcattttgtaaatgtcagtgtggtctcagactgtggtaccagagccctttctgtagagaagccaagattggtttgctttcctgttgtgactctttttctcctttgctttcttaagttaatggagtgcaacacctacaagcacagcactgatgcttgtgctgcttttgaggagaattaacaccttctgggtgccagcaccrctccaaccctccagacacgagcacaactgcacgtctcaccccaygyctgtgcctgcagttgtcttcccactgagccatggagcgaggcagaacctaggattgccttattgtggtgtgattaccctgcacagacctcgtccttctcttctcgaggtgctgctgctttgctgtctctccctgattgacctctgctggggacagcgatcgatgcgtgcagagccgcagcgctgaggcagtcggtgcctgtgcctgtcacgctctgctgtgggctggcagcatcccagccccgggctcattgct

SEQ ID NO: 93093 - DNA, 600 bp, Chicken  19866894411114_2
tggaagggaagtgtgtggggaaggtgctgtatttctttttctttggttaatgtctttcattttgtaaatgtcagtgtggtctcagactgtggtaccagagccctttctgtagagaagccaagattggtttgctttcctgttgtgactctttttctcctttgctttcttaagttaatggagtgcaacacctacaagcacagcactgatgcttgtgctgcttttgaggagaattaacaccttctgggtgccagcaccrctccaaccctccagacacgagcacaactgcacgtctcaccccaygyctgtgcctgcagttgtcttcccactgagccatggagcgaggcagaacctaggattgccttattgtggtgtgattaccctgcacagacctcgtccttctcttctcgaggtgctgctgctttgctgtctctccctgattgacctctgctggggacagcgatcgatgcgtgcagagccgcagcgctgaggcagtcggtgcctgtgcctgtcacgctctgctgtgggctggcagcatcccagccccgggctcattgctgtgcagctctgggaggcagcagccaatgctgagcgtgagcatcg

SEQ ID NO: 93094 - DNA, 600 bp, Chicken  19866894411114_3
gaagggaagtgtgtggggaaggtgctgtatttctttttctttggttaatgtctttcattttgtaaatgtcagtgtggtctcagactgtggtaccagagccctttctgtagagaagccaagattggtttgctttcctgttgtgactctttttctcctttgctttcttaagttaatggagtgcaacacctacaagcacagcactgatgcttgtgctgcttttgaggagaattaacaccttctgggtgccagcaccrctccaaccctccagacacgagcacaactgcacgtctcaccccaygyctgtgcctgcagttgtcttcccactgagccatggagcgaggcagaacctaggattgccttattgtggtgtgattaccctgcacagacctcgtccttctcttctcgaggtgctgctgctttgctgtctctccctgattgacctctgctggggacagcgatcgatgcgtgcagagccgcagcgctgaggcagtcggtgcctgtgcctgtcacgctctgctgtgggctggcagcatcccagccccgggctcattgctgtgcagctctgggaggcagcagccaatgctgagcgtgagcatcggt

SEQ ID NO: 93095 - DNA, 600 bp, Chicken  19866894411116_1
caacggcccaaggtaacaggagagacccgggatagtacaaaggagataagaaatatttagacagctgatttaacaaggcacaatagttgatttatggtctgaacgaaagcctacctaaagtactccatttcatttcagcaggttttaaatcaaatcaagccttagggggaaaaatgcagagataaaattttcattaactcttccagctttgctacaaaaagtcagctaaacaagaatgtaattcctcctctggcaaatggtcctcatcaggaacaggctgtcacctacctgctaacacasagggtgctgttgctgctacaattgccacccagagccctgggaggaacaaggagcaacacgcttcagaaacatgctgtcaagccaaagaaacattgacaatttgggggtgggtgaggcaggttcagctccaatgaaaaagtgttgaaatacagtacaagcagggtgagccacaaaatatatgttttattcaagctgtgtgaacttgtgtgttcaaatgaatgttttatttgctctattatcaaatgctgtcctaaatagaatcctatttaatagctatgtcgaactgtcacggtatttgag

SEQ ID NO: 93096 - DNA, 600 bp, Chicken  19866894411122_1
tagtgccagcagggaggagggctgggagcaggcgtgactttctctgaggatggtccatttagagagcaatggcttgtctaatctggtcctttgggaaagctctgtgagcaagtgtacagccacagttattactgaagctttcactcttgatacaagcttgcagccatcagtctgtgccttgcctttctcctgccccttcttttctttcctcaggcatttctctccacaaactcagccaagcctcagaagatcccttttcacctgttgttcaacacggtgcagggctcaccctccctgcayggccagcgtgggaagggttaaaagccagctcccccaggaggctacgcttcacttgataatatcatcagcttgtgacagtgttaatgtggggatcaggtgcaccaggcagcctgcattaccctggagagagatgagttgtgtccggaagagccatgactggatacgtggcataattgccccrgggcctgacgacagctccctgaccccttccctcttaataaaccattagctgccccacagcctcttgttgctccatccttcccttctcctccctctgcccacaccccctactcccatgcg

SEQ ID NO: 93097 - DNA, 600 bp, Chicken  19866894411122_2
cctttctcctgccccttcttttctttcctcaggcatttctctccacaaactcagccaagcctcagaagatcccttttcacctgttgttcaacacggtgcagggctcaccctccctgcayggccagcgtgggaagggttaaaagccagctcccccaggaggctacgcttcacttgataatatcatcagcttgtgacagtgttaatgtggggatcaggtgcaccaggcagcctgcattaccctggagagagatgagttgtgtccggaagagccatgactggatacgtggcataattgccccrgggcctgacgacagctccctgaccccttccctcttaataaaccattagctgccccacagcctcttgttgctccatccttcccttctcctccctctgcccacaccccctactcccatgcgctgcctcctgctcaggctgctcagtgccaccctgggagacgcagtctcagtgtgacaattaccctgatggaatagtgacagtggcaaaaaacaagtgacacccgtcgctactgcccctccgcccctctcagctctcccacaccctctgcccgccgccctcctgtgtgtttgatgcgctggg

SEQ ID NO: 93098 - DNA, 600 bp, Chicken  19866894411123_1
tgtcctgttccaaatgcaattcccctcatggtttgttcctccaattcatccatcacaaacaggcagggaaaaggctaaatcgcttctcaggatgaagagcacttccactgctgcttggaggcttcactctggacatgatgacaacagcccaggtccctcatcacaccagacactttagactcaagaagaagaaacttctgagtcagagcactgccactgaaaaaaatggatgtgtttgtacccaacatgaagtattttcttctaaaagctttgcttgtagcactattgattactcctaawggagaagcagaccacagataagaggtatagttctattctttctactgtagaggattcatcaccaaatatcagacaaaaagcacatatttgagctcactttgaggggcttccattttcttaacaccatgattactattggcttttaattctattgtcaacaggattgtaagaggttagctactgatagaccctctgctcttaattacttgcagcacatgtagttgcacctcttacactgaaagaggcaccgaagaggccaggaatgtcctccaaaacagaattctgcattttcaccatttc

SEQ ID NO: 93099 - DNA, 600 bp, Chicken  19866894411129_1
ctgtggcctggaagtgacatctacactactaagtgtatctgctctggaaaagcaaactgtcctcccagttcagatggtgcaagttgcttcaggccctgtttctctaagtcctgcaggtttttatttcacctctctctctaaagcagtggggatccatgaagaagcaatacattaattcaggtgtactgggagatgtttgattttgtggacatcaactcacgaaaaggatcatgaaggttttgtcatcttgggtaaggtgctgtgcctgtctaaaccctgggttgcatagaaaagtagttycaacgtccaactgttgtgtggagtcatgtgaaatgacttatccccaaggaatccacttgctcaagaactgctgcaccattttgcatttttcaggtaagacactattgagggtgcggtatgttctcttgaatcattactgctggcaaagatgcacaagaaaggaagatcttagtgtgagctctcagactcaaagtagagtttgcatggagagttgtacaatatttataaatccaacgtgtttgatctaggaatcattgagtaacagcaaacacagaactatatcatgccatattttttcaa

SEQ ID NO: 93100 - DNA, 600 bp, Chicken  19866894411135_1
gtttagcattcacatcccttgttatttaatttcattgcttctacttcacctaaagagtgtctttctaattgtacacccatcctcctgcaatccaagtgatcagcagcacttctctaccaaaaaccccagtcacacaaaggtgtgagggttgactaagctagctccattcatttctatattgccagagagatcatatagagagagtttgctaattagacataaaattgtgtgagaattttggaagactttcagcacttcaaaacacctctgtcatcttttaaggaagcacatttcccttgragttcctcacttacaacaaacagcagacgttgcacagcaggttcagcagaaaagggggaaaagttatttttccatcgggtggtaaataatctattattacgtgaaatgttttatccctttaggaaaatgtgagtgtctgcttctgtgggacactgttcaccattcaggcgtggagggctgactcktgggggtaaggytgggccagggctgacattttgccacacaacaacacactygtggtacccgtgaccaacccaagggctgcccaagaccacctcagccatcccagctggcctactg

SEQ ID NO: 93101 - DNA, 600 bp, Chicken  19866894411135_2
agagatcatatagagagagtttgctaattagacataaaattgtgtgagaattttggaagactttcagcacttcaaaacacctctgtcatcttttaaggaagcacatttcccttgragttcctcacttacaacaaacagcagacgttgcacagcaggttcagcagaaaagggggaaaagttatttttccatcgggtggtaaataatctattattacgtgaaatgttttatccctttaggaaaatgtgagtgtctgcttctgtgggacactgttcaccattcaggcgtggagggctgactcktgggggtaaggytgggccagggctgacattttgccacacaacaacacactygtggtacccgtgaccaacccaagggctgcccaagaccacctcagccatcccagctggcctactgccatggcagtgcgtgtcatccatcgaaaagaagggctgtgaaagtaggaacattctgtgcttcctgaaaaggcagctgacccaagcatgtccctgcactcggtgctgtatttgtttgcaactctgcaggtgcccagtgtgttgaatgtattcgaagcagagaaatgcaacctgataaggacaact

SEQ ID NO: 93102 - DNA, 600 bp, Chicken  19866894411135_3
gagagagtttgctaattagacataaaattgtgtgagaattttggaagactttcagcacttcaaaacacctctgtcatcttttaaggaagcacatttcccttgragttcctcacttacaacaaacagcagacgttgcacagcaggttcagcagaaaagggggaaaagttatttttccatcgggtggtaaataatctattattacgtgaaatgttttatccctttaggaaaatgtgagtgtctgcttctgtgggacactgttcaccattcaggcgtggagggctgactcktgggggtaaggytgggccagggctgacattttgccacacaacaacacactygtggtacccgtgaccaacccaagggctgcccaagaccacctcagccatcccagctggcctactgccatggcagtgcgtgtcatccatcgaaaagaagggctgtgaaagtaggaacattctgtgcttcctgaaaaggcagctgacccaagcatgtccctgcactcggtgctgtatttgtttgcaactctgcaggtgcccagtgtgttgaatgtattcgaagcagagaaatgcaacctgataaggacaactgtgatgttttgc

SEQ ID NO: 93103 - DNA, 600 bp, Chicken  19866894411135_4
tttggaagactttcagcacttcaaaacacctctgtcatcttttaaggaagcacatttcccttgragttcctcacttacaacaaacagcagacgttgcacagcaggttcagcagaaaagggggaaaagttatttttccatcgggtggtaaataatctattattacgtgaaatgttttatccctttaggaaaatgtgagtgtctgcttctgtgggacactgttcaccattcaggcgtggagggctgactcktgggggtaaggytgggccagggctgacattttgccacacaacaacacactygtggtacccgtgaccaacccaagggctgcccaagaccacctcagccatcccagctggcctactgccatggcagtgcgtgtcatccatcgaaaagaagggctgtgaaagtaggaacattctgtgcttcctgaaaaggcagctgacccaagcatgtccctgcactcggtgctgtatttgtttgcaactctgcaggtgcccagtgtgttgaatgtattcgaagcagagaaatgcaacctgataaggacaactgtgatgttttgcgccttggtaggaataatcaattgcaaagaaatggggtga

SEQ ID NO: 93104 - DNA, 600 bp, Chicken  19866894411137_1
atggacttttggtttctgaaactatttctcataggataaatggtatgatgcgattaaggcattaactataagacaaaccttccagtagtaatgccttctatttattttcatggaaattacaacagatacaatgagcatagtaactctgtttgatagaacaagttctcagcttcaaaatactgtttttcaacatggtcacaacccataactgtttcaccaggattcttaccagtgatgaacaagaatctgcatgctgtgcccatagaagtgttcaccagagaatgtgacccagtgttaatrttgccactgctgaaatgcaccacccactgcctcactgygctcacatctactgttcggtccccataaacatttacgagcataagtgaatgtcggtgggytccattttttttttctgcatggaggaattcagtttcaccactttgcatcaggactgccatctgtttcatggcaacaccatgtaatggaatattgttggtaaggttcagcctctactgccaaaccaccaacatctgcctaagatgttgtgggccaacatcataaaacaggaagcattactttcagagcatcccttgtaaaaaa

SEQ ID NO: 93105 - DNA, 600 bp, Chicken  19866894411137_2
aatggtatgatgcgattaaggcattaactataagacaaaccttccagtagtaatgccttctatttattttcatggaaattacaacagatacaatgagcatagtaactctgtttgatagaacaagttctcagcttcaaaatactgtttttcaacatggtcacaacccataactgtttcaccaggattcttaccagtgatgaacaagaatctgcatgctgtgcccatagaagtgttcaccagagaatgtgacccagtgttaatrttgccactgctgaaatgcaccacccactgcctcactgygctcacatctactgttcggtccccataaacatttacgagcataagtgaatgtcggtgggytccattttttttttctgcatggaggaattcagtttcaccactttgcatcaggactgccatctgtttcatggcaacaccatgtaatggaatattgttggtaaggttcagcctctactgccaaaccaccaacatctgcctaagatgttgtgggccaacatcataaaacaggaagcattactttcagagcatcccttgtaaaaaaatataatrtagttaatgtatataagtaccaaaacttat

SEQ ID NO: 93106 - DNA, 600 bp, Chicken  19866894411137_3
tatttattttcatggaaattacaacagatacaatgagcatagtaactctgtttgatagaacaagttctcagcttcaaaatactgtttttcaacatggtcacaacccataactgtttcaccaggattcttaccagtgatgaacaagaatctgcatgctgtgcccatagaagtgttcaccagagaatgtgacccagtgttaatrttgccactgctgaaatgcaccacccactgcctcactgygctcacatctactgttcggtccccataaacatttacgagcataagtgaatgtcggtgggytccattttttttttctgcatggaggaattcagtttcaccactttgcatcaggactgccatctgtttcatggcaacaccatgtaatggaatattgttggtaaggttcagcctctactgccaaaccaccaacatctgcctaagatgttgtgggccaacatcataaaacaggaagcattactttcagagcatcccttgtaaaaaaatataatrtagttaatgtatataagtaccaaaacttattttaacttttaatatttttattaaaacactaacaacaaaagagcaacaaacccataaaac

SEQ ID NO: 93107 - DNA, 600 bp, Chicken  19866894411137_4
gctgaaatgcaccacccactgcctcactgygctcacatctactgttcggtccccataaacatttacgagcataagtgaatgtcggtgggytccattttttttttctgcatggaggaattcagtttcaccactttgcatcaggactgccatctgtttcatggcaacaccatgtaatggaatattgttggtaaggttcagcctctactgccaaaccaccaacatctgcctaagatgttgtgggccaacatcataaaacaggaagcattactttcagagcatcccttgtaaaaaaatataatrtagttaatgtatataagtaccaaaacttattttaacttttaatatttttattaaaacactaacaacaaaagagcaacaaacccataaaaccagtgggatgtttgaccttgtttttctggaactgatgcatcagtctggtttgaaggcagtgggtgcaattcttagtgaggcctcaaggtgttcatcagagactgtcagattgacagtaattgttcccaaatgtatgcactgacaaaaagtgatgatgtgaacaaggcatggttgtgaaacaagggatacttttctttggtaatagaggac

SEQ ID NO: 93108 - DNA, 600 bp, Chicken  19866894411145_1
acaggcttctggctattggttccatttgtctcctctttgccgtgttctgcctcccactcctgtagaacttcatctatgttgaaacgacgtcggtaatttacaaaaaagtttttcacttgcaccacagatttgttaccgatcacatcagagattgcctgaaagtctcgtccgtatttcctgattgctaaaagcaacaagaagaaaaacaaaagtgaagtgttatttccacaaagaccacaaatcaggctcgagtcacagcaaaaggatccaaagctgaacttctgcccagttttcaagccsttctctgattaaaccagcatgaaacagtctcagctgtgcaggaggcaaaattaagactagccccrcagaagaaaaggagctgtagcaaagacaggcagaacaaaatgtggaagacttgtgtaaatctgcctgtactgctcgagaggtcgcacaggcaaagagcaaagctgtgacctcagcagggtttcagaaagctgtgacaagcagagattatatgcaagtgctcatatggtwaaatgcatactgttgggggaggggctgacaatagttcccttgttcagtctgttttttatgcattaa

SEQ ID NO: 93109 - DNA, 600 bp, Chicken  19866894411145_2
aacttcatctatgttgaaacgacgtcggtaatttacaaaaaagtttttcacttgcaccacagatttgttaccgatcacatcagagattgcctgaaagtctcgtccgtatttcctgattgctaaaagcaacaagaagaaaaacaaaagtgaagtgttatttccacaaagaccacaaatcaggctcgagtcacagcaaaaggatccaaagctgaacttctgcccagttttcaagccsttctctgattaaaccagcatgaaacagtctcagctgtgcaggaggcaaaattaagactagccccrcagaagaaaaggagctgtagcaaagacaggcagaacaaaatgtggaagacttgtgtaaatctgcctgtactgctcgagaggtcgcacaggcaaagagcaaagctgtgacctcagcagggtttcagaaagctgtgacaagcagagattatatgcaagtgctcatatggtwaaatgcatactgttgggggaggggctgacaatagttcccttgttcagtctgttttttatgcattaataaacatcaacatcaaaatccttcattagctgctrcactgaaacagctatgaaatgcaagagact

SEQ ID NO: 93110 - DNA, 600 bp, Chicken  19866894411145_3
ccacaaatcaggctcgagtcacagcaaaaggatccaaagctgaacttctgcccagttttcaagccsttctctgattaaaccagcatgaaacagtctcagctgtgcaggaggcaaaattaagactagccccrcagaagaaaaggagctgtagcaaagacaggcagaacaaaatgtggaagacttgtgtaaatctgcctgtactgctcgagaggtcgcacaggcaaagagcaaagctgtgacctcagcagggtttcagaaagctgtgacaagcagagattatatgcaagtgctcatatggtwaaatgcatactgttgggggaggggctgacaatagttcccttgttcagtctgttttttatgcattaataaacatcaacatcaaaatccttcattagctgctrcactgaaacagctatgaaatgcaagagacttgattatagcctcctgaagtacaaatacacttgtagtgccataccttgcacagcaagragctgctcatctgtggtccaacgtgcattaaatttctgaacaacctagatggcataaaaaaaacaaatcagatagctgacattaacataaccagtaacttccacttgtaac

SEQ ID NO: 93111 - DNA, 600 bp, Chicken  19866894411145_4
gtgcaggaggcaaaattaagactagccccrcagaagaaaaggagctgtagcaaagacaggcagaacaaaatgtggaagacttgtgtaaatctgcctgtactgctcgagaggtcgcacaggcaaagagcaaagctgtgacctcagcagggtttcagaaagctgtgacaagcagagattatatgcaagtgctcatatggtwaaatgcatactgttgggggaggggctgacaatagttcccttgttcagtctgttttttatgcattaataaacatcaacatcaaaatccttcattagctgctrcactgaaacagctatgaaatgcaagagacttgattatagcctcctgaagtacaaatacacttgtagtgccataccttgcacagcaagragctgctcatctgtggtccaacgtgcattaaatttctgaacaacctagatggcataaaaaaaacaaatcagatagctgacattaacataaccagtaacttccacttgtaaccgagctcataaaaacctcacaaaracacagcrattaattcactgttagtcaaactatcactcattttagtagcagcgttgttttcaacgaagaactgcgtg

SEQ ID NO: 93112 - DNA, 600 bp, Chicken  19866894411145_5
atctgcctgtactgctcgagaggtcgcacaggcaaagagcaaagctgtgacctcagcagggtttcagaaagctgtgacaagcagagattatatgcaagtgctcatatggtwaaatgcatactgttgggggaggggctgacaatagttcccttgttcagtctgttttttatgcattaataaacatcaacatcaaaatccttcattagctgctrcactgaaacagctatgaaatgcaagagacttgattatagcctcctgaagtacaaatacacttgtagtgccataccttgcacagcaagragctgctcatctgtggtccaacgtgcattaaatttctgaacaacctagatggcataaaaaaaacaaatcagatagctgacattaacataaccagtaacttccacttgtaaccgagctcataaaaacctcacaaaracacagcrattaattcactgttagtcaaactatcactcattttagtagcagcgttgttttcaacgaagaactgcgtgtggcatctattcagttaactgtgacacacacggcacctgtaagtcactggatgatataaaaagatagggaacagtctcagcagataac

SEQ ID NO: 93113 - DNA, 600 bp, Chicken  19866894411145_6
ctgacaatagttcccttgttcagtctgttttttatgcattaataaacatcaacatcaaaatccttcattagctgctrcactgaaacagctatgaaatgcaagagacttgattatagcctcctgaagtacaaatacacttgtagtgccataccttgcacagcaagragctgctcatctgtggtccaacgtgcattaaatttctgaacaacctagatggcataaaaaaaacaaatcagatagctgacattaacataaccagtaacttccacttgtaaccgagctcataaaaacctcacaaaracacagcrattaattcactgttagtcaaactatcactcattttagtagcagcgttgttttcaacgaagaactgcgtgtggcatctattcagttaactgtgacacacacggcacctgtaagtcactggatgatataaaaagatagggaacagtctcagcagataaccaagagccacaaactcttcagaagcacctacttgtctttatcacaggcaccctctgtaatcttggtcaaattatttccatcatgaggtgccagagttggaagaaaaacagcaaaagcactgagtgccaagagaaa

SEQ ID NO: 93114 - DNA, 600 bp, Chicken  19866894411145_7
agttcccttgttcagtctgttttttatgcattaataaacatcaacatcaaaatccttcattagctgctrcactgaaacagctatgaaatgcaagagacttgattatagcctcctgaagtacaaatacacttgtagtgccataccttgcacagcaagragctgctcatctgtggtccaacgtgcattaaatttctgaacaacctagatggcataaaaaaaacaaatcagatagctgacattaacataaccagtaacttccacttgtaaccgagctcataaaaacctcacaaaracacagcrattaattcactgttagtcaaactatcactcattttagtagcagcgttgttttcaacgaagaactgcgtgtggcatctattcagttaactgtgacacacacggcacctgtaagtcactggatgatataaaaagatagggaacagtctcagcagataaccaagagccacaaactcttcagaagcacctacttgtctttatcacaggcaccctctgtaatcttggtcaaattatttccatcatgaggtgccagagttggaagaaaaacagcaaaagcactgagtgccaagagaaaggacaggc

SEQ ID NO: 93115 - DNA, 600 bp, Chicken  19866894411151_1
tccacatgctgcagaagcaggaagtcccagatctgaccagaaaagagaaaccatcctttgaggtgaaggcagttatctccctgcgcccatagaaacttcattgatagtgtttgcatggaaagaggaaactgacttgggtttctatgagcagttcctaaagatgcttagcagcaaaggttggacagaaaaagtagggcagatggtgtcagtatgtctccttttttgagcactagaatacctatagacatatcactgcccatctttgcccatctagcctcttgtagagctctgaacttgtcyttctgtctcttgcagagctccaccgccacgagagcatccaagagaagaatgtgaaagaagccaaaaccaagtgcaaaaccattgcatccctgctgacagacgcacccaacccccactccaagggggtgttgatgttcaagaagcgcaggcagagggctaagaaatatacattagtgagctttgggagtgtcgacgaagaccgttcctacgaggaagaagacggaattttcccaactagtgagtctgaatttgacgaggaaggtttctctgatgccccgaagcttaacaaatcactcagac

SEQ ID NO: 93116 - DNA, 599 bp, Chicken  19866894411154_1
  misc_feature (1)..(12): n is any nucleotide
nnnnnnnnnnnnaagcagttttccaatacaaaacagaaggggaaatcctggctcttctgaagcaaagaagagtttctcctgaggactaaccaatttacgctggcagctggagctaataggaggggtgttccaaaggtaatgcttcctatattacgatgttggcccatgacatcagaggtggatgttggcagtaggacagtagaggctgaaccttcccccccaacatcccattacattttgttgctgtgtgaaagatggcagcagaggtgcagtccgtcagaatggcgtctgacatggaartgcacatgaagcaaagctgtgtcactgaattcctctgkgcagaataaaggccaaccactgacattccttgacgcttggtgaacgtttatggagaccaagcagtgggtgtgaacatagtgaggtggtgggtggtgcatctcaacagtagtgacagcgacagtgggtcacctcctctggtacagatgtttataaggacagcatgcaggcacttgttcatcactgccaaaaggcacggctaatagtggtgattatgttgaaaagtagcattttgcatttgagaatttgctctatcaaacagt

SEQ ID NO: 93117 - DNA, 600 bp, Chicken  19866894411154_2
ggggaaatcctggctcttctgaagcaaagaagagtttctcctgaggactaaccaatttacgctggcagctggagctaataggaggggtgttccaaaggtaatgcttcctatattacgatgttggcccatgacatcagaggtggatgttggcagtaggacagtagaggctgaaccttcccccccaacatcccattacattttgttgctgtgtgaaagatggcagcagaggtgcagtccgtcagaatggcgtctgacatggaartgcacatgaagcaaagctgtgtcactgaattcctctgkgcagaataaaggccaaccactgacattccttgacgcttggtgaacgtttatggagaccaagcagtgggtgtgaacatagtgaggtggtgggtggtgcatctcaacagtagtgacagcgacagtgggtcacctcctctggtacagatgtttataaggacagcatgcaggcacttgttcatcactgccaaaaggcacggctaatagtggtgattatgttgaaaagtagcattttgcatttgagaatttgctctatcaaacagtctttgtgtctgttgtggtttccatggaaagaaataggag

SEQ ID NO: 93118 - DNA, 465 bp, Chicken  19866894411154_3
tcacctcctctggtacagatgtttataaggacagcatgcaggcacttgttcatcactgccaaaaggcacggctaatagtggtgattatgttgaaaagtagcattttgcatttgagaatttgctctatcaaacagtctttgtgtctgttgtggtttccatggaaagaaataggaggcattacttttggtgtgacatacctacaaagacccaccttccttctagcattagtcccttccatttctatttgggttttgctgctggaacaggtttctctttttaaaatgtcaggttcatggaagytagtgattctgcctgtgctctcaagatggcaactttgcgactatgaagtcagcaggagaacagggcaaaatggggagggaagaagtgttactgctacattattacctaatctttctagaactctcctcttctccccttagttttcttagtgctcccagcaggttt

SEQ ID NO: 93119 - DNA, 600 bp, Chicken  19866894411159_1
tcacaggttttagagagaatttagcgtaatgtagtcatgatctttcgtgggttttctaccattctatcctggaggttttcaagaagttgtagatatggcactgaggggcatggtttagtgggcatgctggtgacgtgttgatggttggactagatgatcttagtgctcttttcctaccttaatgattctatgattctgtgataccattactgtggtaaaaataataacgccacgctgacaccttcaaattatcagaatttttaaaattccttctgaatgtgcataatccccattgttacmttaaaaagctcgcaacttagaaagttmttgtcctgaagaatgcctttaagaatgtcttttgcttattataattactttgttattatattacttattacagtaaccttattctaaatagcagctggtacttatcatgataaagaaaaggaaatctctcttccacgttggtgcgtaatagcaaagttcacagcctcacctccagcacagtgaccaatatcttcctcagggaaccacttgtgtcacctttcacatcagattccaggtctttggcaaagactgtgcaggaaaaaaacaaatctg

SEQ ID NO: 93120 - DNA, 600 bp, Chicken  19866894411159_2
aatgtagtcatgatctttcgtgggttttctaccattctatcctggaggttttcaagaagttgtagatatggcactgaggggcatggtttagtgggcatgctggtgacgtgttgatggttggactagatgatcttagtgctcttttcctaccttaatgattctatgattctgtgataccattactgtggtaaaaataataacgccacgctgacaccttcaaattatcagaatttttaaaattccttctgaatgtgcataatccccattgttacmttaaaaagctcgcaacttagaaagttmttgtcctgaagaatgcctttaagaatgtcttttgcttattataattactttgttattatattacttattacagtaaccttattctaaatagcagctggtacttatcatgataaagaaaaggaaatctctcttccacgttggtgcgtaatagcaaagttcacagcctcacctccagcacagtgaccaatatcttcctcagggaaccacttgtgtcacctttcacatcagattccaggtctttggcaaagactgtgcaggaaaaaaacaaatctgtgagggttcactcagtggtgaaggctt

SEQ ID NO: 93121 - DNA, 600 bp, Chicken  19866894411159_3
ctttctgatctttttaattcaaaaattaataagaccctggagaagagctggctagtgttcatgtgtcagctgagcactcgtgttgagaataacatctaccaatgatttatttcaagctctttcttcagctaacatttcctgcagtccaggaagtatttgacagcttcagaacaacagtgaagaaggccagttctacatctattgttctgaagtgtgctcttgcccaaccgcagatgagctccatccctcgagccagcagctgccaccagtgctgggccagtcccagggcactggcggacygygcttcctcagcagtgtgcagytytgctctcccaaagatccagggtaggaagggctgagatgtgcccacatcaccgggatgagccctggaatttgcccatttccaatgcctgtttttattaatgctcattaaagaatgaactcagtggtgtgtgygcactcagaatcatgcttgctgtctggtttacttatgacaggctttccacttcagcactgcctgtcttattaaaattgattaaatattgaagagcaatcagaccttaagaaaatagcgatttaataataagttctaagggatac

SEQ ID NO: 93122 - DNA, 600 bp, Chicken  19866894411159_4
ttctgatctttttaattcaaaaattaataagaccctggagaagagctggctagtgttcatgtgtcagctgagcactcgtgttgagaataacatctaccaatgatttatttcaagctctttcttcagctaacatttcctgcagtccaggaagtatttgacagcttcagaacaacagtgaagaaggccagttctacatctattgttctgaagtgtgctcttgcccaaccgcagatgagctccatccctcgagccagcagctgccaccagtgctgggccagtcccagggcactggcggacygygcttcctcagcagtgtgcagytytgctctcccaaagatccagggtaggaagggctgagatgtgcccacatcaccgggatgagccctggaatttgcccatttccaatgcctgtttttattaatgctcattaaagaatgaactcagtggtgtgtgygcactcagaatcatgcttgctgtctggtttacttatgacaggctttccacttcagcactgcctgtcttattaaaattgattaaatattgaagagcaatcagaccttaagaaaatagcgatttaataataagttctaagggatacag

SEQ ID NO: 93123 - DNA, 600 bp, Chicken  19866894411159_5
aattaataagaccctggagaagagctggctagtgttcatgtgtcagctgagcactcgtgttgagaataacatctaccaatgatttatttcaagctctttcttcagctaacatttcctgcagtccaggaagtatttgacagcttcagaacaacagtgaagaaggccagttctacatctattgttctgaagtgtgctcttgcccaaccgcagatgagctccatccctcgagccagcagctgccaccagtgctgggccagtcccagggcactggcggacygygcttcctcagcagtgtgcagytytgctctcccaaagatccagggtaggaagggctgagatgtgcccacatcaccgggatgagccctggaatttgcccatttccaatgcctgtttttattaatgctcattaaagaatgaactcagtggtgtgtgygcactcagaatcatgcttgctgtctggtttacttatgacaggctttccacttcagcactgcctgtcttattaaaattgattaaatattgaagagcaatcagaccttaagaaaatagcgatttaataataagttctaagggatacagttgtttacctaaaaaatacag

SEQ ID NO: 93124 - DNA, 600 bp, Chicken  19866894411159_6
ttaataagaccctggagaagagctggctagtgttcatgtgtcagctgagcactcgtgttgagaataacatctaccaatgatttatttcaagctctttcttcagctaacatttcctgcagtccaggaagtatttgacagcttcagaacaacagtgaagaaggccagttctacatctattgttctgaagtgtgctcttgcccaaccgcagatgagctccatccctcgagccagcagctgccaccagtgctgggccagtcccagggcactggcggacygygcttcctcagcagtgtgcagytytgctctcccaaagatccagggtaggaagggctgagatgtgcccacatcaccgggatgagccctggaatttgcccatttccaatgcctgtttttattaatgctcattaaagaatgaactcagtggtgtgtgygcactcagaatcatgcttgctgtctggtttacttatgacaggctttccacttcagcactgcctgtcttattaaaattgattaaatattgaagagcaatcagaccttaagaaaatagcgatttaataataagttctaagggatacagttgtttacctaaaaaatacagtg

SEQ ID NO: 93125 - DNA, 600 bp, Chicken  19866894411159_7
ttgacagcttcagaacaacagtgaagaaggccagttctacatctattgttctgaagtgtgctcttgcccaaccgcagatgagctccatccctcgagccagcagctgccaccagtgctgggccagtcccagggcactggcggacygygcttcctcagcagtgtgcagytytgctctcccaaagatccagggtaggaagggctgagatgtgcccacatcaccgggatgagccctggaatttgcccatttccaatgcctgtttttattaatgctcattaaagaatgaactcagtggtgtgtgygcactcagaatcatgcttgctgtctggtttacttatgacaggctttccacttcagcactgcctgtcttattaaaattgattaaatattgaagagcaatcagaccttaagaaaatagcgatttaataataagttctaagggatacagttgtttacctaaaaaatacagtggaagcttttattttccttacaagccaaatcataaaggcagtctttgtgtcctcccccagaaaccaagcgcccttggagatttctcgttttttcaatgtgtggtctatctcatcatgagcataaatcaatat

SEQ ID NO: 93126 - DNA, 600 bp, Chicken  19866894411160_1
ctgccggctttctaacggaggtgatggtgctaccaccccaggaaatgaaatatggtgcattttgcatgttttcctcgttgagttggcagcttcaaaaaaagtgcattattaatgctgaaatctaagaaatgttggcttgcttaaaatactgatggtttgaaacaatgttgtttaaatgttgctgacctaaggattttctttgacgcttactcttatttcttttggatacgctttgttatttatctaagcaactctggtcattgaatgaggtttcaagagacaaggtaaacagaggaaagmaatcaatacaggcaagcacaaataagtttctctatcacaactgtgcttctttcatattacaacactgaaactgtgaaaatgtattgattcagtaaacttttccatatttctaaaaagcacgggatcaagaaygctggtccatactgagagcctgaggaagaggctaagatttgttggctttggcacaggcatgcagaggcagtctgatatcatcaagtttgaaaaaggaggacagcgacagcgggtgactcaaatacaacataaactcagttaatttacagcacggacttggttttaata

SEQ ID NO: 93127 - DNA, 600 bp, Chicken  19866894411160_2
tggcttgcttaaaatactgatggtttgaaacaatgttgtttaaatgttgctgacctaaggattttctttgacgcttactcttatttcttttggatacgctttgttatttatctaagcaactctggtcattgaatgaggtttcaagagacaaggtaaacagaggaaagmaatcaatacaggcaagcacaaataagtttctctatcacaactgtgcttctttcatattacaacactgaaactgtgaaaatgtattgattcagtaaacttttccatatttctaaaaagcacgggatcaagaaygctggtccatactgagagcctgaggaagaggctaagatttgttggctttggcacaggcatgcagaggcagtctgatatcatcaagtttgaaaaaggaggacagcgacagcgggtgactcaaatacaacataaactcagttaatttacagcacggacttggttttaataaaaagcaggggaactggtacacagtgctggcagaaagcctgagacaaaatcagatttagctgtagatatcaataaggaagcacagccaaatagtgccattactatgcttatttattgttgcttaatttttta

SEQ ID NO: 93128 - DNA, 600 bp, Chicken  19866894411161_1
tcaaaaagtcatgccttacgtgcccaacttcaacagagcacatacagggctgtcccttctgctattgcccaatggagacagagggaagaaacaagctagtggaagatgagacttccttaccaggaagacgtatagaaacaaagaggtaaaggaagggtaggattaaccgggagcacaagacatggcccagcttcttctgccgtttgctggctagcacaatgctctacagtctttgccttcaaactcttccttgtcctagccaatgacgtacagttttgtatcatagggctaactccccartgaatgtaaatgtgagtaactccattgcattcattggagcttgccatcagttttcaagatgcttttaagcatcagatataaacaacctgccaccatgaatatactttgtttgagtggatttttcagtgctccaacacacctattaattgcagtaatgttttgctgcactcctttggattaaaatgctatttctaagtgtcagttaatgggttttagtgaaagcaatttattaaacattatgtactcagtttaaatctaacagggtaactaaacattaaagtaacagagagaaaaatctat

SEQ ID NO: 93129 - DNA, 600 bp, Chicken  19866894411163_1
gatcattttttctagatatgtttgtattagaaattaatctgaataatgtgtatcatatttaaatcatatatgactgacagctgggaacagagtacttccaatgagaaaaagcagcagtgaaggcttgttcatagcaggtagtttagtcacattgtattgagtgaataagaatattaaaatcagagcaaaaacaggttttttttgctacctctgcattcactttctgcaactccattcctctttgaccatttctgcgactatttcttaccaggggacatacttattgagttgttcacaatrcttccaggttaatcttgatgctctctctgtgctgatcctcatgaaraygtttcactctcagcaggctttggtgctgactaatcacacgctgggcgaaactccttgtggagaagtcttcatgaaaacatctttccaattgaaaaggaccctctttagaaagagctggtagttttcaagactaagttcatctttgtcccaagtagtctccaaagtgcaattacttggttatgctccatgcataccataacatttaagtttttcctttcttgttgtattattcattcaataatcccaaggcaa

SEQ ID NO: 93130 - DNA, 600 bp, Chicken  19866894411163_2
tgtgtatcatatttaaatcatatatgactgacagctgggaacagagtacttccaatgagaaaaagcagcagtgaaggcttgttcatagcaggtagtttagtcacattgtattgagtgaataagaatattaaaatcagagcaaaaacaggttttttttgctacctctgcattcactttctgcaactccattcctctttgaccatttctgcgactatttcttaccaggggacatacttattgagttgttcacaatrcttccaggttaatcttgatgctctctctgtgctgatcctcatgaaraygtttcactctcagcaggctttggtgctgactaatcacacgctgggcgaaactccttgtggagaagtcttcatgaaaacatctttccaattgaaaaggaccctctttagaaagagctggtagttttcaagactaagttcatctttgtcccaagtagtctccaaagtgcaattacttggttatgctccatgcataccataacatttaagtttttcctttcttgttgtattattcattcaataatcccaaggcaatttgtgaatttatatacttcatctacagagttcagcaattattact

SEQ ID NO: 93131 - DNA, 600 bp, Chicken  19866894411163_3
tgtatcatatttaaatcatatatgactgacagctgggaacagagtacttccaatgagaaaaagcagcagtgaaggcttgttcatagcaggtagtttagtcacattgtattgagtgaataagaatattaaaatcagagcaaaaacaggttttttttgctacctctgcattcactttctgcaactccattcctctttgaccatttctgcgactatttcttaccaggggacatacttattgagttgttcacaatrcttccaggttaatcttgatgctctctctgtgctgatcctcatgaaraygtttcactctcagcaggctttggtgctgactaatcacacgctgggcgaaactccttgtggagaagtcttcatgaaaacatctttccaattgaaaaggaccctctttagaaagagctggtagttttcaagactaagttcatctttgtcccaagtagtctccaaagtgcaattacttggttatgctccatgcataccataacatttaagtttttcctttcttgttgtattattcattcaataatcccaaggcaatttgtgaatttatatacttcatctacagagttcagcaattattactca

SEQ ID NO: 93132 - DNA, 600 bp, Chicken  19866894411163_4
gtagttttcaagactaagttcatctttgtcccaagtagtctccaaagtgcaattacttggttatgctccatgcataccataacatttaagtttttcctttcttgttgtattattcattcaataatcccaaggcaatttgtgaatttatatacttcatctacagagttcagcaattattactcacttgtagcaaggttaaaagaaatcttccagatcttctagtccagcaaaacatgtgtgagttcataatttgtagaagcgttcgtacagattacatgcagtggcagggatgtaaccaaygagtacaaaaccagcatggctatctgtatgttacctaaactcgctcagcaccatgcagttaaagaagaggacaaatctctccaactggctcaactggccattgctcctctgcttggctggcacacagaatctgaggagacaggctgctgcagtacttccaactgggacgatccgcatgcagaagggaggttgcacacacagatttcatgacctctctgctgtagggagcatctgaggtatgggtgggttaccactgggtcatgacacatcccaaaacactgatgacctgaggacaatggt

SEQ ID NO: 93133 - DNA, 599 bp, Chicken  19866894411167_1
  misc_feature (1)..(138): n is any nucleotide
nnnnnnnnnnnnnnnnnnnnnnnnnnnnnnnnnnnnnnnnnnnnnnnnnnnnnnnnnnnnnnnnnnnnnnnnnnnnnnnnnnnnnnnnnnnnnnnnnnnnnnnnnnnnnnnnnnnnnnnnnnnnnnnnnnnnnnnnnngctggttggctgtatgtagtgtactgagacatgaagtgtatgaggagccatggcgctgggtgccagtgagcaaggttcatgcctcacagcaggaggcagagaagttggctgcataaacatctcacatctgtttgcctagcaaatgccacccatatggaatarcatcgactacagaaagatctgccaggtgttttggaaggcatctccaacccaaagaaaccaccaaaatgattctgcaaataattaagagttctttagatttactgctttgacaatatgccctggccatgcttcagcctcaaacagaccccgagttcttccttccttcacactgcagtcccaccctcctgcagactccattacttgtgaccaaayataacacacractcatcctctacaggtacattctttgctgtcagtcatctccagaataaatgcagcagggtacccatagggtctgt

SEQ ID NO: 93134 - DNA, 600 bp, Chicken  19866894411167_2
ttcatgcctcacagcaggaggcagagaagttggctgcataaacatctcacatctgtttgcctagcaaatgccacccatatggaatarcatcgactacagaaagatctgccaggtgttttggaaggcatctccaacccaaagaaaccaccaaaatgattctgcaaataattaagagttctttagatttactgctttgacaatatgccctggccatgcttcagcctcaaacagaccccgagttcttccttccttcacactgcagtcccaccctcctgcagactccattacttgtgaccaaayataacacacractcatcctctacaggtacattctttgctgtcagtcatctccagaataaatgcagcagggtacccatagggtctgtgtattttgggtggaataagtgctgaagtttataatcctgcatgccgttataaaccactcgcacaatgactttgtggcaggattttcattttatcagcccagctaggcaaactgaagtaacattgcacaggcatccatctccttggacttatgtgcactgtcacatcagagagctgcttactgttgagtgagtgttaaggtgaaagtgtgcatca

SEQ ID NO: 93135 - DNA, 600 bp, Chicken  19866894411167_3
acagcaggaggcagagaagttggctgcataaacatctcacatctgtttgcctagcaaatgccacccatatggaatarcatcgactacagaaagatctgccaggtgttttggaaggcatctccaacccaaagaaaccaccaaaatgattctgcaaataattaagagttctttagatttactgctttgacaatatgccctggccatgcttcagcctcaaacagaccccgagttcttccttccttcacactgcagtcccaccctcctgcagactccattacttgtgaccaaayataacacacractcatcctctacaggtacattctttgctgtcagtcatctccagaataaatgcagcagggtacccatagggtctgtgtattttgggtggaataagtgctgaagtttataatcctgcatgccgttataaaccactcgcacaatgactttgtggcaggattttcattttatcagcccagctaggcaaactgaagtaacattgcacaggcatccatctccttggacttatgtgcactgtcacatcagagagctgcttactgttgagtgagtgttaaggtgaaagtgtgcatcagtgtgacaca

SEQ ID NO: 93136 - DNA, 600 bp, Chicken  19866894411171_1
aatactccaatgttactttgctttttgaagacaatggaaatttactccagagctttacctcatcgctgctggaacgcttgtgaacagcagcattccagcgccattctgtttctgcctcagtctgactcctcctgtactagaggcagctggctttgcagcagtgatacttttttccccatttcacttgaacccgttccctccagaaaatctaattcacatcttctgaatttgcatgaagcagaacactagtcgtaggcacctcccaatcctccatgcttaaaaaaagctctccttttccayggrggaatcatgtgtcctcctgcttttcagacatgagtgttgacaccaggaggtttatccttctcctggcctggctgttgaggacaaatacaagcttgcatcatctgtgagaggaaaatgattctttagtgtgaatttctttaagacaatacaggcaatgcaatgtcctggccctctttatagtagacacaacaggtcaccacacaccaatactgaacacagtcgtacggtttcctttaggaaagaggtgcttttgtgctgtctggagaaagcagtgtatccttttctaccaatatgacc

SEQ ID NO: 93137 - DNA, 600 bp, Chicken  19866894411171_2
actccaatgttactttgctttttgaagacaatggaaatttactccagagctttacctcatcgctgctggaacgcttgtgaacagcagcattccagcgccattctgtttctgcctcagtctgactcctcctgtactagaggcagctggctttgcagcagtgatacttttttccccatttcacttgaacccgttccctccagaaaatctaattcacatcttctgaatttgcatgaagcagaacactagtcgtaggcacctcccaatcctccatgcttaaaaaaagctctccttttccayggrggaatcatgtgtcctcctgcttttcagacatgagtgttgacaccaggaggtttatccttctcctggcctggctgttgaggacaaatacaagcttgcatcatctgtgagaggaaaatgattctttagtgtgaatttctttaagacaatacaggcaatgcaatgtcctggccctctttatagtagacacaacaggtcaccacacaccaatactgaacacagtcgtacggtttcctttaggaaagaggtgcttttgtgctgtctggagaaagcagtgtatccttttctaccaatatgacccat

SEQ ID NO: 93138 - DNA, 600 bp, Chicken  19866894411172_1
cagaggaaatgtgtctcctccaagtgggctgtgctcagtaggtccaccttgcaggttaaaggtattccagtaactagaactggcctcaaaaaggttgtgcttccctttcagtggtttggagtagcctgcttaatctaaatgcaactttgtggcccctggtttgtgcagggagtgagggatctatgttatgctcttttctgcacttcaatgtgtgtcaaaaagatactgtgagtgcactaaaacagtaaagccctgtttcctttcccatgcatgataagaactacgctgtaatgccactgmatcttaaagaaccaaactgtgtacatatcacagttaagtgcttatgcttaagtgttaaatgacagatggcaaatgttactttgctgtagactcctaagaagcctgtgttctctcaacttattaatcatttcaagttggcattgcatttggctttgtatgtagcttggcctttaacctgaagctccctttttctttttcyagtcttaagaacacttccttatatatggaaatatcttatttcagatactgtctttaaacttacactggaagatactaggttaacaactgttactgtttcca

SEQ ID NO: 93139 - DNA, 600 bp, Chicken  19866894411172_2
gcacttcaatgtgtgtcaaaaagatactgtgagtgcactaaaacagtaaagccctgtttcctttcccatgcatgataagaactacgctgtaatgccactgmatcttaaagaaccaaactgtgtacatatcacagttaagtgcttatgcttaagtgttaaatgacagatggcaaatgttactttgctgtagactcctaagaagcctgtgttctctcaacttattaatcatttcaagttggcattgcatttggctttgtatgtagcttggcctttaacctgaagctccctttttctttttcyagtcttaagaacacttccttatatatggaaatatcttatttcagatactgtctttaaacttacactggaagatactaggttaacaactgttactgtttccacaaacacactcctttgtcaagtggaagctcatgaaacaggaagggtaatgcacagctgatacatccctgtgccaaamcagttgwgggtcgaaatcagctgcttctgctttaaaaatcatcctaaaacacttcagctatgattctcatgctgaaaggcctgcttcttactgcagtgtgctgaaacacatggcctttctgc

SEQ ID NO: 93140 - DNA, 565 bp, Chicken  19866894411172_3
actttgctgtagactcctaagaagcctgtgttctctcaacttattaatcatttcaagttggcattgcatttggctttgtatgtagcttggcctttaacctgaagctccctttttctttttcyagtcttaagaacacttccttatatatggaaatatcttatttcagatactgtctttaaacttacactggaagatactaggttaacaactgttactgtttccacaaacacactcctttgtcaagtggaagctcatgaaacaggaagggtaatgcacagctgatacatccctgtgccaaamcagttgwgggtcgaaatcagctgcttctgctttaaaaatcatcctaaaacacttcagctatgattctcatgctgaaaggcctgcttcttactgcagtgtgctgaaacacatggcctttctgctgtagggaaaaactaagattaattgttttgaagagtggcagaaatactggcaggatttttcttgtggcttctttttgcaaatcacttttcaactttcttcaataaattgggcagtgctggtgcaagctgctgcaatggtctgg

SEQ ID NO: 93141 - DNA, 558 bp, Chicken  19866894411172_4
tgtagactcctaagaagcctgtgttctctcaacttattaatcatttcaagttggcattgcatttggctttgtatgtagcttggcctttaacctgaagctccctttttctttttcyagtcttaagaacacttccttatatatggaaatatcttatttcagatactgtctttaaacttacactggaagatactaggttaacaactgttactgtttccacaaacacactcctttgtcaagtggaagctcatgaaacaggaagggtaatgcacagctgatacatccctgtgccaaamcagttgwgggtcgaaatcagctgcttctgctttaaaaatcatcctaaaacacttcagctatgattctcatgctgaaaggcctgcttcttactgcagtgtgctgaaacacatggcctttctgctgtagggaaaaactaagattaattgttttgaagagtggcagaaatactggcaggatttttcttgtggcttctttttgcaaatcacttttcaactttcttcaataaattgggcagtgctggtgcaagctgctgcaatggtctgg

SEQ ID NO: 93142 - DNA, 600 bp, Chicken  19866894411176_1
cttttgaagcagtactcatgtgtaacttgatattaaatatcacacaactcaagccatgatgaatatggcttaggactacgtactatggtttaagttctatccatgtagaaatccctcttctggtaaaaagtcccaaacacacattgtgatgttcaacctaagctttcaatttccttcttctgtttcgtactgttgctcctaaataccttcaggaattctcatgtctgttcttggcgataataacctgaagccacttcccctcttctagcgtaagagtgggccaattccatagatattcarcaccattagtatggagtctaacacaagcactgtgggagctgatttttccagagactctgtaagcttcacagtatgtattttcttgacttttgctgttcagaaatactgcagaaggtatggttaacagtagtaccgcaggatttttggacatcacaagatgcattgagcattttatttttgtgaggattagtatgaagttctgaagctgttaaatgagttgcttggtgaaagttgagaagtctgtgtactggttgaagttggatgatgcagaatttatgcccaacaattgatgaagattca

SEQ ID NO: 93143 - DNA, 599 bp, Chicken  19866894411195_1
  misc_feature (1)..(39): n is any nucleotide
nnnnnnnnnnnnnnnnnnnnnnnnnnnnnnnnnnnnnnnaacttccagccagacgaggggaagggattcttcagctctgctctgtgctgtgcagcctcacatcaagcattgttgatttgggatttgggcactacaatataaggacatataactacaagagaacatgcaaaggagggctacaaagatgaatggtctagagaggaaaatgcatgaggagtggctggggtcccttagtttgttcagcccagaggaggctgcgatgagtcctcatggaggcctacagctcttcatgagaggaargaatgacacagaggggcagcactgagctctgatctctggtgacagtgacaggacctgatgaaacggygtgttgctgtgtcataggagagccagtattgcgtgttaggagaaggttcttcaccagagagtggtgggcatagcacaggctccccagggcagtgggcacattcccaagctgctcaaaatattctgattctgtgaaactgtcattctatgttgaactatgtgtaaatgatgagagaaagataacctgagaggcaaaaaagtctattagggatgacctcaaggtctcaccactg

SEQ ID NO: 93144 - DNA, 600 bp, Chicken  19866894411195_2
tcttcagctctgctctgtgctgtgcagcctcacatcaagcattgttgatttgggatttgggcactacaatataaggacatataactacaagagaacatgcaaaggagggctacaaagatgaatggtctagagaggaaaatgcatgaggagtggctggggtcccttagtttgttcagcccagaggaggctgcgatgagtcctcatggaggcctacagctcttcatgagaggaargaatgacacagaggggcagcactgagctctgatctctggtgacagtgacaggacctgatgaaacggygtgttgctgtgtcataggagagccagtattgcgtgttaggagaaggttcttcaccagagagtggtgggcatagcacaggctccccagggcagtgggcacattcccaagctgctcaaaatattctgattctgtgaaactgtcattctatgttgaactatgtgtaaatgatgagagaaagataacctgagaggcaaaaaagtctattagggatgacctcaaggtctcaccactgcaccacagcacaaacctaaaatctgctgtgctctatcagggggtcacttttgtacatatgtgtgcata

SEQ ID NO: 93145 - DNA, 600 bp, Chicken  19866894411198_1
actttgcacagcaagtacatctattttttactctcaagcccgagacagtaggttttaatagtgcacagactttttcacttgtccctgtgctgctcgttccaaggatttttccaggaaaggaaactctctcagagggtaaactacattttcatacagctagtggtaaaagcagcatactgaaacactcctgacttccaattttactggaaaaaaaaggacagattatatatcttcacagtattaagcacagacattagtcatatttaaggctgaagcggtactacagttggcagcaacaaytgcagctgcaacatgagacgataacagttcaaaaggaaataaattaacaaataggaaatctagaattttaccagatctttcacacaatggcaaacgataagcaaagcgactgccaaaccaccaagtcagcataaagctattccgtctatctgagcttttcacaagctgagcttgattggacaaagtaaaagaaacgtcagtattttaattaatcctcccaactattttggtatagaaagaaattaggggagctacagggagggaagactcagtccccctccacttgaaagaaatgtactg

SEQ ID NO: 93146 - DNA, 600 bp, Chicken  19866894411198_2
aaacgtcagtattttaattaatcctcccaactattttggtatagaaagaaattaggggagctacagggagggaagactcagtccccctccacttgaaagaaatgtactgagaacaacgttttaataaaacacttttaaactacagactcagtagttcttatgtccaaaagaggcaagaactccttatgctaatttgaagctatatactcctgcaatgccagctcaacagctcaagcaatagaacagataccctatggacatgccaactaaacattccttcgaggtgagcagtaaaccttycttcagtaacgtgcaagaagcgaagaagcagtgttgtacatctctaggcaacagcaaagatgacctcagggccaaaagcctccaaattaaagcaggcttcgggagctaacagagaaaaacaaaaccgtagtttaaaacatcagaccttttatccataagccatctccctctgccccaacagaaatgccctgtctcttgttgaacaacagaagatctacagttgaagtacttcaaccactttcctctcccttgtaagaggattatctgtaaaatcaacagaccgaggactggactgctcac

SEQ ID NO: 93147 - DNA, 600 bp, Chicken  19866894411212_1
gttatcatttgggatgaatagcttaagatggtaaccctctcctctgctttaggagcttgaaggaaaatgtactgcaaaagcatttctgccagaacttaagttccaaatatcagacacaaaacccttcataggatctcttgttgcacaaattccaggccattgttattttccgaatacattcctgatttttcatgaggaaaaggagcccaaaatggttttagtatgtgttgctaatgcttcagtctgttctacttgtacaacctccatcttttatggctgaaatattaagatattttcccyaaaaatttgctttttttctaccctctagcttagaggttggcaatatatttcttacaagcaacatcaaaaactgagggtcttctagatgaatataattaattgattttgttcacaatgtcccactgcactcaaaatcacaaatggctcctatgtgaattcagagacatttaacttcgtttatgtgctgttttttatgcatattgaaggacagtgatacatagatacagatattatattttgaaagtcctcaaagaaggtgtatccaaacctgattcctactactcttgtttcctaggggct

SEQ ID NO: 93148 - DNA, 548 bp, Chicken  19866894411216_1
catgttgccacactgagaacatcccccagatgattttgggaagagggactgtctgaaaaaccacggtcagaaacatctgggaagcaggctggcctgcccaaagtttacattgcagttcagcccaattcagactaaatgggagctgcctcaagttgttaaccccaggggcacttggaatgggaggtctgtgtcggatccaaacaaaataacaatcaatcccaaaatgcagcctaaaatgcaaattaaaccagaatagaaaccatttgttttaaaaaagtaaccgtataaacaaaggacaaycacaacaacaacaacaaaaaaaaaggcagaaaaagcacatatttgctcgaggaactgtaagaggtccccaactacttcctgtcgcttaaagatggagatggtttttactccccgtgcagcaaggcagacgggccttcgtgtgagaggggctcataaatgccatccttggctcagctgttgcagctcttcctgttgcatccccagtgacgccttttccaggaggctggatgagcaaggcagaagtgcca

SEQ ID NO: 93149 - DNA, 600 bp, Chicken  19866894411230_1
ctcctgcatctacagccgagatgtactgggctgctcactttttgcagaaaggtcacagatagcatttctgcgtatggaaatatgcctgcacatcaagcttttcaaatatcaaaaggagagcaatattttttaaatgtcaacagacaagcagtacctgtgcatctttggggatttgtacagggtataaattgctgaaaaaagagacttaggtcaacagaaacaggtaatcttgtgtccataggaaagtaatccacagactgtacaaatatctgggcaggtatttgtagcttcattcaaccygacttctgtcggtacctcactgcccatcataaccagtaggtttaacccagagccctgttgagcagggcccaagcagccrggaatatctagcggtgtgggaccacccctgggctttgggagccatctgtccctttctctttcatgccatataaatcagatcctgcgctgtttcaactctcagcccatcccagatacagctcttggagctgttttcatttctgtacatgaatgaccaaggccaacctgggaccagccaggagctacctccagtggtcactgggatttacagctctgatacgt

SEQ ID NO: 93150 - DNA, 600 bp, Chicken  19866894411230_2
atatgcctgcacatcaagcttttcaaatatcaaaaggagagcaatattttttaaatgtcaacagacaagcagtacctgtgcatctttggggatttgtacagggtataaattgctgaaaaaagagacttaggtcaacagaaacaggtaatcttgtgtccataggaaagtaatccacagactgtacaaatatctgggcaggtatttgtagcttcattcaaccygacttctgtcggtacctcactgcccatcataaccagtaggtttaacccagagccctgttgagcagggcccaagcagccrggaatatctagcggtgtgggaccacccctgggctttgggagccatctgtccctttctctttcatgccatataaatcagatcctgcgctgtttcaactctcagcccatcccagatacagctcttggagctgttttcatttctgtacatgaatgaccaaggccaacctgggaccagccaggagctacctccagtggtcactgggatttacagctctgatacgtctctcatcttcgacactatggcctagagcacttttcggggcatagtttttctgaggcatttaacagtctccttgtttta

SEQ ID NO: 93151 - DNA, 600 bp, Chicken  19866894411250_1
aatgactattaataaccgagcttatgtttttccaaacagacatgaactaatttttgatcagcatcacaataatttactatgttttctgtctgcagaaagatttacagtatttcattacaagcatagagaaaatgctgattaagtccaaaggaggcagttttcacttacaaagaataatgtgatgtgaactataaaataaagtaaaataaaataaaatagctcgtctggtccaaaataggacatgtgtttgcattgtggtctggaaatcattaccccactggatgtccaggagaaattaawtaaataaataaataaataaaaatgaagagagtgagttccaggacaagcaaagaaacaaaagaaaattccttaatttcaatgccagaaatgaggatatatgatttcccattgacttcttcccttgccccaaaccagctattcaggataattagtgcatagagtaattatagactgtaaatgtctgtaaccagagaggtaaactagcaattagtggcggcacaggtgtaaaaggaaattaagcgaacttacagtctgtttgcgtaaaaatggcagtgtattcagagaagtctagaagtaaaa

SEQ ID NO: 93152 - DNA, 600 bp, Chicken  19866894411257_1
acttaagctgcctcttaagtgatgacaaaatagcattttgcttgtaactcaattagttttgccaagtttacaaattattggatgaaccttatctgtagccttcagaaactgttttgtacattattgtgatggcttagatgttaggctttatttaaacattagaacccttccttactcattaccaggaccgagagcaaaggaaacagctaacatctatattgcaaagtcatctttaatgagaatctctagtagtgcactgaaatcagttaagcactctgagaaaaacataacaacaatttwaaaaaatggctagcaaaagaaacatgataaattacggactgagaagttatcttgatcatgcattttcgattgtctatcccatttctgtcccccactgttttattctaacatctgaaattcatttaaatgtccacttgtattcaacagtgtctggtggaggtcacaaaaaatatggaattttcacccaaagtgaggtctgagctattacttgmctctttccatttacagaaaaacagaagatttcttaggacaagaaacacattttctgtcagtgaaatgtacattttggtgttcagtggt

SEQ ID NO: 93153 - DNA, 600 bp, Chicken  19866894411257_2
tctatattgcaaagtcatctttaatgagaatctctagtagtgcactgaaatcagttaagcactctgagaaaaacataacaacaatttwaaaaaatggctagcaaaagaaacatgataaattacggactgagaagttatcttgatcatgcattttcgattgtctatcccatttctgtcccccactgttttattctaacatctgaaattcatttaaatgtccacttgtattcaacagtgtctggtggaggtcacaaaaaatatggaattttcacccaaagtgaggtctgagctattacttgmctctttccatttacagaaaaacagaagatttcttaggacaagaaacacattttctgtcagtgaaatgtacattttggtgttcagtggtaatgatgacaataaatataactcccagagccctctaattgtagactgtacctacagactgtgcatttgatagtgaagtctagcatgcctcaacctatagaaagctaatttgctcctttctgtagaaataattcatttgtcttggtctcatgacaaatggagaatgtgcccttcctttgagtaaaatctaggtgcgtctgttccaagcagttg

SEQ ID NO: 93154 - DNA, 600 bp, Chicken  19866894411267_1
gagggatctgtagcctccattagctgcatagtatgaagaaatggaagttttttcaagactcctaatggtgagcccccccttagaaacaagatagtctaattgtttggacgtgagttgtgagttgaaaagggcttgtattattgacaatcctggtgagttgctgtgagagtttgaataaaagacagtgcctctacagtgcctcactttaccatttcagccacttctctgtttctctaaaacctttggaacaaaggctgtcccttagagtaaaaataaggatgcacactgttatctattaawgataacagctctgcagttgcaagcagtgaacagaggctgttgttttcttgcttytggaatcactaattctatggagctgaaatataatttgctctttatactgtatagcgtatataaaagctgaaagagttgcagagctccatcctgggatggtaatgagcatataggatgaatgtgcatcattgtcatgccagtaataattggtagtttcccgatatggctaatgccagatgaattaaaactaatatactgagtaacttgatgaaacctcatcgattttgatgtactaatgaaacaggt

SEQ ID NO: 93155 - DNA, 600 bp, Chicken  19866894411267_2
aagactcctaatggtgagcccccccttagaaacaagatagtctaattgtttggacgtgagttgtgagttgaaaagggcttgtattattgacaatcctggtgagttgctgtgagagtttgaataaaagacagtgcctctacagtgcctcactttaccatttcagccacttctctgtttctctaaaacctttggaacaaaggctgtcccttagagtaaaaataaggatgcacactgttatctattaawgataacagctctgcagttgcaagcagtgaacagaggctgttgttttcttgcttytggaatcactaattctatggagctgaaatataatttgctctttatactgtatagcgtatataaaagctgaaagagttgcagagctccatcctgggatggtaatgagcatataggatgaatgtgcatcattgtcatgccagtaataattggtagtttcccgatatggctaatgccagatgaattaaaactaatatactgagtaacttgatgaaacctcatcgattttgatgtactaatgaaacaggtaatccatttttctcatagaatgggtaagaagaaaacactattttgaaaaattat

SEQ ID NO: 93156 - DNA, 599 bp, Chicken  19866894411268_1
  misc_feature (1)..(8): n is any nucleotide
nnnnnnnnagttttttggttgttttatagctacactttgtgtataatgtacttcatttgtcatcttctgtaattatttttccaacgctgcatctaccacagagacaatatgtgaatttcaataagctgagaaagctgttcatgaagggaataacaatttggatgtgtggaggtagttacttgcattcatttatttttaaatggaagtttccttttcctttctatttttgtcctttattattaataacgttgtaactttccccaaaacattgctgtgttgtacgtgagctctgcaggcagyggtacagcaagagcaatttctttcaattaggcagaattagctaaaatgggttaaagcaacaaggaagcaattggggctgcaaacctgagctaaaagccagagcccttctgctctcacgcactgcgactgaaagagaaccaaatgcttttccagcgcagggagctgtaagtaaattaagagcctgcttgctggcagatgctggtagggcttcagtctctgtactgcccctttggggtaatttcctgacatgtctcctatttgatgatttcccaatcagtgtgctgttactacacggggta

SEQ ID NO: 93157 - DNA, 600 bp, Chicken  19866894411273_1
agggattttgaagacagcagagagttgctctgttttccgccattgcctaagtttccactgcatttgagttatgctcttcaaaaacgtatcgccaaaaacagctaagcaaattttgttcctacattttctttggctgtgcaaggaaaactgaccaactggatataaaataatgtctctgtgtatctcttctgagatgtatgcctagatgtataccagtactgaatgaaaagtgattaaacagcatccaacctagaaagaatgctaaagctacaactgacccaacaggagctgttcagatcstccctgcactctagcatgctcagggtaaattctcgctyctccaagtgsggaggcgagccctaggtaaggagccagcagctgctaatrgagaacatgcctgggtagaataaagatgaatattacatatataggtatcctgagtaagatgaatcagaatatgagagaaagaaaacaaccctttattttaatgtttattttaatattactattaattaaataatgtatgaatataggctttgctaatatacatatgcacacacatgaacaaaaacacacatgtatatacacacaaatagatgt

SEQ ID NO: 93158 - DNA, 600 bp, Chicken  19866894411273_2
gccattgcctaagtttccactgcatttgagttatgctcttcaaaaacgtatcgccaaaaacagctaagcaaattttgttcctacattttctttggctgtgcaaggaaaactgaccaactggatataaaataatgtctctgtgtatctcttctgagatgtatgcctagatgtataccagtactgaatgaaaagtgattaaacagcatccaacctagaaagaatgctaaagctacaactgacccaacaggagctgttcagatcstccctgcactctagcatgctcagggtaaattctcgctyctccaagtgsggaggcgagccctaggtaaggagccagcagctgctaatrgagaacatgcctgggtagaataaagatgaatattacatatataggtatcctgagtaagatgaatcagaatatgagagaaagaaaacaaccctttattttaatgtttattttaatattactattaattaaataatgtatgaatataggctttgctaatatacatatgcacacacatgaacaaaaacacacatgtatatacacacaaatagatgtgaatactcatgtgattcctatattgttgctgagtaaga

SEQ ID NO: 93159 - DNA, 600 bp, Chicken  19866894411273_3
aagtttccactgcatttgagttatgctcttcaaaaacgtatcgccaaaaacagctaagcaaattttgttcctacattttctttggctgtgcaaggaaaactgaccaactggatataaaataatgtctctgtgtatctcttctgagatgtatgcctagatgtataccagtactgaatgaaaagtgattaaacagcatccaacctagaaagaatgctaaagctacaactgacccaacaggagctgttcagatcstccctgcactctagcatgctcagggtaaattctcgctyctccaagtgsggaggcgagccctaggtaaggagccagcagctgctaatrgagaacatgcctgggtagaataaagatgaatattacatatataggtatcctgagtaagatgaatcagaatatgagagaaagaaaacaaccctttattttaatgtttattttaatattactattaattaaataatgtatgaatataggctttgctaatatacatatgcacacacatgaacaaaaacacacatgtatatacacacaaatagatgtgaatactcatgtgattcctatattgttgctgagtaagatttatcaacc

SEQ ID NO: 93160 - DNA, 600 bp, Chicken  19866894411273_4
atcgccaaaaacagctaagcaaattttgttcctacattttctttggctgtgcaaggaaaactgaccaactggatataaaataatgtctctgtgtatctcttctgagatgtatgcctagatgtataccagtactgaatgaaaagtgattaaacagcatccaacctagaaagaatgctaaagctacaactgacccaacaggagctgttcagatcstccctgcactctagcatgctcagggtaaattctcgctyctccaagtgsggaggcgagccctaggtaaggagccagcagctgctaatrgagaacatgcctgggtagaataaagatgaatattacatatataggtatcctgagtaagatgaatcagaatatgagagaaagaaaacaaccctttattttaatgtttattttaatattactattaattaaataatgtatgaatataggctttgctaatatacatatgcacacacatgaacaaaaacacacatgtatatacacacaaatagatgtgaatactcatgtgattcctatattgttgctgagtaagatttatcaaccaaagaaaactcattgcagaaagagttacagtggattagc

SEQ ID NO: 93161 - DNA, 599 bp, Chicken  19866894411275_1
  misc_feature (1)..(215): n is any nucleotide
nnnnnnnnnnnnnnnnnnnnnnnnnnnnnnnnnnnnnnnnnnnnnnnnnnnnnnnnnnnnnnnnnnnnnnnnnnnnnnnnnnnnnnnnnnnnnnnnnnnnnnnnnnnnnnnnnnnnnnnnnnnnnnnnnnnnnnnnnnnnnnnnnnnnnnnnnnnnnnnnnnnnnnnnnnnnnnnnnnnnnnnnnnnnnnnnnnnnnnnnnnnnnnnnnnnnnnntttttgtaacctttaaaatgaactcttgctcttaatgaactcccatcattttctaattatttaaataatttattctacccacaaytgttgtggtacataatggaggttatattcatgaagtctcattccgacgcatagaaacttgtagtgatacacagcctaccagtgcaacatttagactcaataaaggcaaaaacagcaatcagccctgaagtttacagtaaagcagaatcccattactgactggatatcagacttctgaggaaccactttcaggctgacagtggtgtctttcagatcacagaggaaaggaagttcagctacagggtgtgcaactttggcactgcaggatgcacagagaaacagatgaattttaagcaaact

SEQ ID NO: 93162 - DNA, 600 bp, Chicken  19866894411278_1
catcagtcagggtattagcaggaggtagaaggtggtggtccttcccatctattcagtccttgcgaggccatccctgcaatgctgggtccagttctgtgctccccagtagaagagagacgtggagctcctagagagagtctagtgatgggccacaaagatgaagaagggtgtggtgcatctctcctatgagaaaaaactgcaggagctgggcctgcaggactgatgttggatcaggccctgggctttgtgatctagctgtggttgtccctgtttattgcaggggaattgggctagatgacwtttaaatgtcccttccaactctaagaattctatgattctacgactgttcggcctggagaagagaaagttctgagtgatcttgctaatgagtgcaaatatctaaagggagggtgtaaagaagacagagctaggattttttcagttgtgtccagtggcaatgtgcacaaactcagatataaragactccatctgacgatcaggaagcactctaggcaaaggttgcccagagagattgtggtgtctcctccttggaggtcttcaaaagccacaaggacatggacctgagcgatctgctttggg

SEQ ID NO: 93163 - DNA, 600 bp, Chicken  19866894411278_2
ctcctatgagaaaaaactgcaggagctgggcctgcaggactgatgttggatcaggccctgggctttgtgatctagctgtggttgtccctgtttattgcaggggaattgggctagatgacwtttaaatgtcccttccaactctaagaattctatgattctacgactgttcggcctggagaagagaaagttctgagtgatcttgctaatgagtgcaaatatctaaagggagggtgtaaagaagacagagctaggattttttcagttgtgtccagtggcaatgtgcacaaactcagatataaragactccatctgacgatcaggaagcactctaggcaaaggttgcccagagagattgtggtgtctcctccttggaggtcttcaaaagccacaaggacatggacctgagcgatctgctttgggtgtccctgctggagcagaggctggagcagatggcctctatgggtcccttttaacctcccctattttatagttctgtgaagatgattttgagaaataatatatggtcttcctcattttcactagaagctcagtgccaattttcttcaccagcaggctgaagaattgggttttcagtttgag

SEQ ID NO: 93164 - DNA, 600 bp, Chicken  19866894411281_1
cagagggcaagaaaatcctctcttcattccttttaattaaatgttacagaaattagaagcagagcactggttaccacatctcatgggctgtcagagtgaagtccacaatcctaaagatcaaacaaatatatcaatttaaataaaagctggctatgtttcatgcaatgggagtcagtagcctttgcagggagaaaggaatgcctgtctttctgctgccttccccctggcctttggagccacacaacgctgtgcagaacaactgtgtaaattgctcattgttcttccagctccttccgcacyctcctcttggaaatagcttctctgaaaactacatctttcagcaaaagctcaaacgaagatgcagggaggaggttgttcttaaatcttttgtgaaagacagagatttcgaagtattgatttttcatatttttgctcttcccagtctttttgtcacgaacatcaaacggaatggctctacgctttgctcattttagctgtggtctggccagatttctgtaatcttctgaaagcttaagagcgtgaaaggaacatcaaaataaaaatttaccccagaaacttgtgccctgaatctgcaaacag

SEQ ID NO: 93165 - DNA, 600 bp, Chicken  19866894411281_2
gaaatagcttctctgaaaactacatctttcagcaaaagctcaaacgaagatgcagggaggaggttgttcttaaatcttttgtgaaagacagagatttcgaagtattgatttttcatatttttgctcttcccagtctttttgtcacgaacatcaaacggaatggctctacgctttgctcattttagctgtggtctggccagatttctgtaatcttctgaaagcttaagagcgtgaaaggaacatcaaaataaaaatttaccccagaaacttgtgccctgaatctgcaaacagtgtcctacrcarccartattactacagagagccgcaagtgttaatttaagtgtatwcataagtgattacagtgcagagaataacttccagtccttaataagcataaacatttgtggaagtcactcaaaawctttgcagatgcctacaagtcattctgttggtttcctgaagccaaccaagcatgcacttatctgttccaaagccaggcctcggaatgcaaagcccacaggtctctgctccacttttacacttgcwgtaaaatctgaaaaggaaagatgcaaaggagagtgcaaaaacttcaacttgcaa

SEQ ID NO: 93166 - DNA, 600 bp, Chicken  19866894411281_3
atagcttctctgaaaactacatctttcagcaaaagctcaaacgaagatgcagggaggaggttgttcttaaatcttttgtgaaagacagagatttcgaagtattgatttttcatatttttgctcttcccagtctttttgtcacgaacatcaaacggaatggctctacgctttgctcattttagctgtggtctggccagatttctgtaatcttctgaaagcttaagagcgtgaaaggaacatcaaaataaaaatttaccccagaaacttgtgccctgaatctgcaaacagtgtcctacrcarccartattactacagagagccgcaagtgttaatttaagtgtatwcataagtgattacagtgcagagaataacttccagtccttaataagcataaacatttgtggaagtcactcaaaawctttgcagatgcctacaagtcattctgttggtttcctgaagccaaccaagcatgcacttatctgttccaaagccaggcctcggaatgcaaagcccacaggtctctgctccacttttacacttgcwgtaaaatctgaaaaggaaagatgcaaaggagagtgcaaaaacttcaacttgcaactt

SEQ ID NO: 93167 - DNA, 600 bp, Chicken  19866894411281_4
cttctctgaaaactacatctttcagcaaaagctcaaacgaagatgcagggaggaggttgttcttaaatcttttgtgaaagacagagatttcgaagtattgatttttcatatttttgctcttcccagtctttttgtcacgaacatcaaacggaatggctctacgctttgctcattttagctgtggtctggccagatttctgtaatcttctgaaagcttaagagcgtgaaaggaacatcaaaataaaaatttaccccagaaacttgtgccctgaatctgcaaacagtgtcctacrcarccartattactacagagagccgcaagtgttaatttaagtgtatwcataagtgattacagtgcagagaataacttccagtccttaataagcataaacatttgtggaagtcactcaaaawctttgcagatgcctacaagtcattctgttggtttcctgaagccaaccaagcatgcacttatctgttccaaagccaggcctcggaatgcaaagcccacaggtctctgctccacttttacacttgcwgtaaaatctgaaaaggaaagatgcaaaggagagtgcaaaaacttcaacttgcaactttttt

SEQ ID NO: 93168 - DNA, 600 bp, Chicken  19866894411281_5
agatgcagggaggaggttgttcttaaatcttttgtgaaagacagagatttcgaagtattgatttttcatatttttgctcttcccagtctttttgtcacgaacatcaaacggaatggctctacgctttgctcattttagctgtggtctggccagatttctgtaatcttctgaaagcttaagagcgtgaaaggaacatcaaaataaaaatttaccccagaaacttgtgccctgaatctgcaaacagtgtcctacrcarccartattactacagagagccgcaagtgttaatttaagtgtatwcataagtgattacagtgcagagaataacttccagtccttaataagcataaacatttgtggaagtcactcaaaawctttgcagatgcctacaagtcattctgttggtttcctgaagccaaccaagcatgcacttatctgttccaaagccaggcctcggaatgcaaagcccacaggtctctgctccacttttacacttgcwgtaaaatctgaaaaggaaagatgcaaaggagagtgcaaaaacttcaacttgcaactttttttatgtgatgtgttacaaaattccaacatttcttttctgct

SEQ ID NO: 93169 - DNA, 600 bp, Chicken  19866894411281_6
tgctcttcccagtctttttgtcacgaacatcaaacggaatggctctacgctttgctcattttagctgtggtctggccagatttctgtaatcttctgaaagcttaagagcgtgaaaggaacatcaaaataaaaatttaccccagaaacttgtgccctgaatctgcaaacagtgtcctacrcarccartattactacagagagccgcaagtgttaatttaagtgtatwcataagtgattacagtgcagagaataacttccagtccttaataagcataaacatttgtggaagtcactcaaaawctttgcagatgcctacaagtcattctgttggtttcctgaagccaaccaagcatgcacttatctgttccaaagccaggcctcggaatgcaaagcccacaggtctctgctccacttttacacttgcwgtaaaatctgaaaaggaaagatgcaaaggagagtgcaaaaacttcaacttgcaactttttttatgtgatgtgttacaaaattccaacatttcttttctgcttgagccatttggttttgctagtgaaggtttaccttgtttccaagatcaaatacagaatagagaagtagtaaata

SEQ ID NO: 93170 - DNA, 600 bp, Chicken  19866894411281_7
aataaaaatttaccccagaaacttgtgccctgaatctgcaaacagtgtcctacrcarccartattactacagagagccgcaagtgttaatttaagtgtatwcataagtgattacagtgcagagaataacttccagtccttaataagcataaacatttgtggaagtcactcaaaawctttgcagatgcctacaagtcattctgttggtttcctgaagccaaccaagcatgcacttatctgttccaaagccaggcctcggaatgcaaagcccacaggtctctgctccacttttacacttgcwgtaaaatctgaaaaggaaagatgcaaaggagagtgcaaaaacttcaacttgcaactttttttatgtgatgtgttacaaaattccaacatttcttttctgcttgagccatttggttttgctagtgaaggtttaccttgtttccaagatcaaatacagaatagagaagtagtaaataaatgtaacagaaaagaaaagaaacacagcagaatttcagcatagagactgcagcaagtccatctggctgccagtgccacaagccgtccttcatcagtccagcaaaaagatgttactgtgtggcca

SEQ ID NO: 93171 - DNA, 600 bp, Chicken  19866894411314_1
ggttccctagaaaggattgcacagaaagatgtccagctgagttctctggagactctgcaacctctctcaaggggaaacaggcagcctgttccagtgttctgtcacctttgcagtaaaaaagtttttcctcgtgttcagatggaactgcctgtgttccattttgtgcccattcccgctgacaagagcagagacaccttgcattagaccaggttccttaaagattcatccaacctggccttgaacacctccagaaacgggacatccatgacttctctgggaagcctgtggcatgcatcaccrctcttgcagtgaataatttctttgtatctaatttacatctcccctcttttagtttaaaggttgctataacgtctccctggtctctcttctgcaggctgaacaacactggttatctatttggcatgtactgcaaactattcatccctttcacctagaacagagaggcatcctcaaaaagtgattaattcttcctgctttagctattgcctttagtcgggatgaattatcctctggacaccttagcttcccaagtttgtttaatgtattaacagaatagggaaggcagtctgtatgctttca

SEQ ID NO: 93172 - DNA, 600 bp, Chicken  19866894411328_1
tgtgggaaaaataatgttaatgctgaagtgggatttagtcaaataattaagagccaaaaatacaaatcatattaatattgtatagaataaatacagagacttttacacatgttgtcactgaaagtttaaaaacttgtttaatgaatgtagtcacctacacttagcacatttaaggctcgagtaagatacttagattcatgtccacctacagataatgacaaattgtatagcagaaaacaaaattgattaaactgtaaatttattttaaaagggtatgaaatgtcttgttgttgttttagmattgagggtaattaatcttttttaggaaaaaaacgctgaaccattaatctgaacttttatttctggaagatttacttcacctgaattcaagtttcagaattaactacaagttgataagatgaattgcctctgatgcacatggagtcacatttgatttagaggacgtattattggcctttatgatcctgacatttatagcaaaagctacgcacactgttggaagcacaaggattatattgtttatgctgaaaatatgagaattatactgtggaaaaaccaacaacaatatttcacaaaggg

SEQ ID NO: 93173 - DNA, 600 bp, Chicken  19866894411329_1
taagaaagcttttattgatttccaacccttccaaaaagaccataatttattccagagactcacattgtcctgatatcaacacaggtcacatttctggttttgttgtgttgttatttccaagttcagaaacctttctcagatttcagtttgattatccaaataaatgtttggcattagaactgctgtgatagatagctcttctaattttttggtttaatcaattatgttattgcacatcagcattgatgtgaaggcttttttttagttgatctggaattgcccatcagatattttcttccycaaagtttggactcttttaagttattattaataaaaatatcaattttaaagggtaagaatacatatatattcattgccctaatagatctacagatattcgcagaatttaactcatttgtttcagtattataactcttttaccctccatatgtagtatagaataatcaaggtttctcaaaggataattaagcagtaggatttaggttctatgggcatttttagacacacagctactggtgaatttcaatagaaaaatatagttctgtgtttctgattaaatgaataccagcatttagaatc

SEQ ID NO: 93174 - DNA, 599 bp, Chicken  19866894411338_1
  misc_feature (1)..(177): n is any nucleotide
nnnnnnnnnnnnnnnnnnnnnnnnnnnnnnnnnnnnnnnnnnnnnnnnnnnnnnnnnnnnnnnnnnnnnnnnnnnnnnnnnnnnnnnnnnnnnnnnnnnnnnnnnnnnnnnnnnnnnnnnnnnnnnnnnnnnnnnnnnnnnnnnnnnnnnnnnnnnnnnnnnnnnnnnnnnnnnnnntgcataagctgatgctaactaatgctaatttttacctctataatcatttcttctttacctgctggaatggggtctggttgagattgttatgccttgaatgtaatgtttgttgaattagaagaytgtcctctgtagcattttttgaaattctttgtattggcagtctgagcccttcaagtaatgtgcctcaggtatatacatttcacagttcttgtgaaaaaatagttttttttctacacattaagtctagttggttattctrctaattgctaagaatcaggagaatccagttgatctgatatttctggattttagcaaggctttcagtaagctttctcacattatccttccagataaaatgtccagctagacaraaacatgatgcaaagagtgaatcactgacaggcagsttgggctcaaaa

SEQ ID NO: 93175 - DNA, 599 bp, Chicken  19866894411338_2
  misc_feature (1)..(38): n is any nucleotide
nnnnnnnnnnnnnnnnnnnnnnnnnnnnnnnnnnnnnntgcataagctgatgctaactaatgctaatttttacctctataatcatttcttctttacctgctggaatggggtctggttgagattgttatgccttgaatgtaatgtttgttgaattagaagaytgtcctctgtagcattttttgaaattctttgtattggcagtctgagcccttcaagtaatgtgcctcaggtatatacatttcacagttcttgtgaaaaaatagttttttttctacacattaagtctagttggttattctrctaattgctaagaatcaggagaatccagttgatctgatatttctggattttagcaaggctttcagtaagctttctcacattatccttccagataaaatgtccagctagacaraaacatgatgcaaagagtgaatcactgacaggcagsttgggctcaaaaggttataataagtggagttacatcagggtggtggccagtcactagtggggctccacagggctccaatttatggctggttcttttcagtgtttccaaaaattgactggactcaggacttgaatgcatactaagtaatttg

SEQ ID NO: 93176 - DNA, 600 bp, Chicken  19866894411338_3
tggttgagattgttatgccttgaatgtaatgtttgttgaattagaagaytgtcctctgtagcattttttgaaattctttgtattggcagtctgagcccttcaagtaatgtgcctcaggtatatacatttcacagttcttgtgaaaaaatagttttttttctacacattaagtctagttggttattctrctaattgctaagaatcaggagaatccagttgatctgatatttctggattttagcaaggctttcagtaagctttctcacattatccttccagataaaatgtccagctagacaraaacatgatgcaaagagtgaatcactgacaggcagsttgggctcaaaaggttataataagtggagttacatcagggtggtggccagtcactagtggggctccacagggctccaatttatggctggttcttttcagtgtttccaaaaattgactggactcaggacttgaatgcatactaagtaatttgcatatgatgctaaattaggaagagctgtttacttctttgagggcagagagaccttgaagagaggtgttggcaagttaaaaggctgggcaatcaccaaccaatcaccagtgcta

SEQ ID NO: 93177 - DNA, 600 bp, Chicken  19866894411338_4
tgaattagaagaytgtcctctgtagcattttttgaaattctttgtattggcagtctgagcccttcaagtaatgtgcctcaggtatatacatttcacagttcttgtgaaaaaatagttttttttctacacattaagtctagttggttattctrctaattgctaagaatcaggagaatccagttgatctgatatttctggattttagcaaggctttcagtaagctttctcacattatccttccagataaaatgtccagctagacaraaacatgatgcaaagagtgaatcactgacaggcagsttgggctcaaaaggttataataagtggagttacatcagggtggtggccagtcactagtggggctccacagggctccaatttatggctggttcttttcagtgtttccaaaaattgactggactcaggacttgaatgcatactaagtaatttgcatatgatgctaaattaggaagagctgtttacttctttgagggcagagagaccttgaagagaggtgttggcaagttaaaaggctgggcaatcaccaaccaatcaccagtgctaagtttgacaagagaaagtgctgaatactgcagctgg

SEQ ID NO: 93178 - DNA, 402 bp, Chicken  19866894411340_1
ctccctttccctgtcacggcctctgtcacgttctctgtctcttctattatctctaggccggtcccgttcccgctctcgatccctctctcgaggcctgcttctccgaccgctgacaactgcttgtgtgcggcgaagaaagtcgtctaccctcatgtcatagtcgtgctgtgagggaaggacagctgtttattttctttgccagatgaaaatcccctccctgtccttatccacgggactggctgtaactcttgggaaagcccagtataaaataattattaaaaacaaaacagcaaaaaaaamcaactgaaaacatgcatccagaagtacaagtttcttctctcatcttcagggcagcaccataaggtctgtgtttctagtatgcatgaagtacagaacagtaag

SEQ ID NO: 93179 - DNA, 600 bp, Chicken  19866894411344_1
atgaggtacttacttgcactaaaataccaagggaaaagtatgaaagatagttttgaagaaaaggatgatataaagaagcgagtgtcaaactgtgaagcttatgttgtaaaagcacctcctgtttctgtagcataccttcacttatggtaacaggcaaatgttgcctttactatttagcataagaaagtggaaattagtgataataaaaagatactagaagtagtaccctgatatcgtgtaatcatttctgggcgaaatccctgcttctaaaatcagacatcacacggctccagacttggyctgaaattaataggtcatttaaaatggatcaatcaattaacaatggaatttgaggtatttttayagaaggattctgaactgtaagaacctagtgtttgttattccgttctcacagaggaggaagggtatttccatagggtctctgtgacacaagaacttttgcaagacatgtttgtatgtgaaccatatcatcagaattggagagagacagcaaaaaaccaagcccaaaccaacagcggaagaaccccaagttatttttgttcttattttcgtgtgkttttttgttttgttttgttttct

SEQ ID NO: 93180 - DNA, 600 bp, Chicken  19866894411344_2
atgatataaagaagcgagtgtcaaactgtgaagcttatgttgtaaaagcacctcctgtttctgtagcataccttcacttatggtaacaggcaaatgttgcctttactatttagcataagaaagtggaaattagtgataataaaaagatactagaagtagtaccctgatatcgtgtaatcatttctgggcgaaatccctgcttctaaaatcagacatcacacggctccagacttggyctgaaattaataggtcatttaaaatggatcaatcaattaacaatggaatttgaggtatttttayagaaggattctgaactgtaagaacctagtgtttgttattccgttctcacagaggaggaagggtatttccatagggtctctgtgacacaagaacttttgcaagacatgtttgtatgtgaaccatatcatcagaattggagagagacagcaaaaaaccaagcccaaaccaacagcggaagaaccccaagttatttttgttcttattttcgtgtgkttttttgttttgttttgttttctgtcgtgcttctgtaaaacagaacaaaacaaagcttttaccaaccaaataatggtaaaagtaaaa

SEQ ID NO: 93181 - DNA, 600 bp, Chicken  19866894411344_3
catcacacggctccagacttggyctgaaattaataggtcatttaaaatggatcaatcaattaacaatggaatttgaggtatttttayagaaggattctgaactgtaagaacctagtgtttgttattccgttctcacagaggaggaagggtatttccatagggtctctgtgacacaagaacttttgcaagacatgtttgtatgtgaaccatatcatcagaattggagagagacagcaaaaaaccaagcccaaaccaacagcggaagaaccccaagttatttttgttcttattttcgtgtgkttttttgttttgttttgttttctgtcgtgcttctgtaaaacagaacaaaacaaagcttttaccaaccaaataatggtaaaagtaaaaccgtgttttgtgaaacgtactgagtgcaaggctctaacttggggagaaggaatgtaatgtgtaaaaatggggcatatttcatgaagtgagaggggagaggaactagagagcagaggggagttttccttggaaagtgtttttcatttggatatgggtggatatacatataaattatactggaaagcggaaggaaaaatgcagttttaacctact

SEQ ID NO: 93182 - DNA, 599 bp, Chicken  19866894411350_1
  misc_feature (1)..(62): n is any nucleotide
nnnnnnnnnnnnnnnnnnnnnnnnnnnnnnnnnnnnnnnnnnnnnnnnnnnnnnnnnnnnnnctatgcatctcaatgccatgaagattcttgatgcttcttatttattaagcataagggaataactgcagtggaagttatttgcaactttcatttaaaaaaacccaacgtactaaaaccaaaagcattagaatctaaagtttctagaagcctgttgtttttgatgaaaactgtctaagttgtgttcagggctaagtgtgctttatcaatttgtaattagtattttggtatgcctttgtgraaaaggtcttcccttgtttgtaggctgtgatttgggctcacactcctgctgaagtcttgaggagtcacttggytgtggctggaaccagcatttttctcttgctgtgttggtttaattactgtctttttacaaggcattgcatgtggtgtaaagaagtttggaaccccaggcagctttgagctaggggacacttttgtagctgattgatttatatgtgtacagaatcaaaccagtccttactaaaccttacaatctgtctgtacataaacgttaacttttaaatgcagtttagttttact

SEQ ID NO: 93183 - DNA, 600 bp, Chicken  19866894411350_2
aatgccatgaagattcttgatgcttcttatttattaagcataagggaataactgcagtggaagttatttgcaactttcatttaaaaaaacccaacgtactaaaaccaaaagcattagaatctaaagtttctagaagcctgttgtttttgatgaaaactgtctaagttgtgttcagggctaagtgtgctttatcaatttgtaattagtattttggtatgcctttgtgraaaaggtcttcccttgtttgtaggctgtgatttgggctcacactcctgctgaagtcttgaggagtcacttggytgtggctggaaccagcatttttctcttgctgtgttggtttaattactgtctttttacaaggcattgcatgtggtgtaaagaagtttggaaccccaggcagctttgagctaggggacacttttgtagctgattgatttatatgtgtacagaatcaaaccagtccttactaaaccttacaatctgtctgtacataaacgttaacttttaaatgcagtttagttttacttcagtgtgttactaaagggttttacagcagtgactcaaagcactttgcattctgcatacaggaggtataagaag

SEQ ID NO: 93184 - DNA, 600 bp, Chicken  19866894411355_1
tgtcaaggctttaaagagcccctccagcgtcttgaattgcacttgaggctgagcagagtcactgcagacataattcaaatggctgtgttactggccctgctagagatgaataaggggatgttcgctcagattaatgggtgaaatactcaaagcttattaactggcatatggaaacattcattgctggaagctgcttttcagggtctaagccagcaatttaacaggacccaaaatgactccatatcttctcatagtcatataaataccagataattgtagctagtgtttaatatcctttcraaagtgtaactttggtatggggatttcaagtctcacctctttttgtagttattccttccagattacttacgtgtggcatggatcacctggctaagttggagtgggcgcacactccatcttcaggacagtgcctggggaataggaatgaagctttaaaagtcctgatttggagaaccagataggaatatacagttgaggtgagaggaagagtgggtggagcacgtagccacaatagaaaccttactgctgtagcagctagagcgttagcaggtgtggctgccttatactgttctacacagg

SEQ ID NO: 93185 - DNA, 600 bp, Chicken  19866894411357_1
aagttgtcccattcagttcttcacacccatcctcaagcttatttggacactgtaggaaaaatcagcatttttaaagagagaaattaaacctgcacctatggagataagattctccatatttgctacagttcacaattttcacacatggaaatcacctatttacatttatcctatttaagtaacacagggtaaggccactccgcattttgttgtatcttttaatgaaggaggtttcagaagaagcttaataagatgtgtagaactgtagtctgaaaaataagctgatggcatggggatggkgtgtgctcagaagactgaagagccttcccagcacccaggtaccagttgttgcatctaatagagcccaccatgtgcgccagcattgttcacctataggttgaggacgtacacacttcattttgcagaggtaacctacatcaggagcatcagatgccaatgccaaacaacagaagtgcagatgtaaatctcttctgcaagtactgcacaatcgctgcacaggaaacacactgtgtatggagggtgccttgttttcttttagtctgcccattttctgaaaagcaaaatacttagtgaatctca

SEQ ID NO: 93186 - DNA, 600 bp, Chicken  19866894411361_1
ctactcataaaaatgaagaaattaacatcctgagccacgagaacaagacttgattctaactttctgcatatccccagaagaaattaaggagttgaggcaaaataaaatcaaaacaaatgtattcatgaacaggatatttgacaatatttggggatatctttgctctcatgcagcatttccactgcattcatttcagtgttactaagaaagtgagtgagcagttagatagttgtagcctacctctccacagactagagacatgttttattatgatcatactgccatgttctcttggcactsaaaaaatgaacaattcattagctccagaaacctcagattactacagctaagagtagagcagactcagtgcttttcttcatcaaaaagagagcagcaaaggtttgaaaagggcgcactcctgcaagatacgtcacagccaatactttcagggcagccattctagataaggaaacccctgctctctcccattaagaatcctccatctacaaaatgaaaggcttacaataaaatctgtaagtgtgaatgccccaaatgttactattattgtattgtcatctataattacaggcaatgcccaca

SEQ ID NO: 93187 - DNA, 600 bp, Chicken  19866894411362_1
atcacagaatggcttgggttgggagggacctcaagggtcattaattccaacccccccaatgtgggcaggtctgacagtcaccagatcaggctacccagggcccagtccacactagccttgaacacctccagggatggggtacccacagattctctgtgcaacatgtttgcttaaatgagaaaggtactcatccatgtgtattcagatgtccttccatacaaagaacaatttcatagaatcatagaatcacagaatagcctgggttgaaaaggaccacaatgatcatctagtttcaacccycctgctatgtgcagggacaccaaccaccagaccaggctgcccagagccacatccagcctggccttgaatgccttcagggatggggcatccacaacctacctgggcaatctgttccagtgtgttaccaccctctgagtgaaaaaaattcttcctgaatttgaaagatttcatcttgcaagaccaaattctcaactcccatagccaaatgagagccttcttttctccactacaagcgaatagttttctgtgacaagttttcaagtatacaatattgagaataacaccaagaatggttaaaga

SEQ ID NO: 93188 - DNA, 599 bp, Chicken  19866894411364_1
  misc_feature (1)..(187): n is any nucleotide
nnnnnnnnnnnnnnnnnnnnnnnnnnnnnnnnnnnnnnnnnnnnnnnnnnnnnnnnnnnnnnnnnnnnnnnnnnnnnnnnnnnnnnnnnnnnnnnnnnnnnnnnnnnnnnnnnnnnnnnnnnnnnnnnnnnnnnnnnnnnnnnnnnnnnnnnnnnnnnnnnnnnnnnnnnnnnnnnnnnnnnnnnnngcttctgggatcagcagcatccttgtttagccattggagagcagattgattgtttttttctccagtgaaatacatggggggagtggcaggggagaggggaaaggaagaggtgytgttttcacatatccttctttgctgtttttccatttcagaacttcagtaatgttttaaggggaattaacttttgaccgttctattcagaagaaaggaatggtatgaaaaccttacatgtaaggagaggcagaataaatgtggtttcttttcccccccccttctctttcagtgctgaaggcagccacacttcgggtcagagtaatggcagagatcatcaagcacttgcaaaagcagttcaggttcaccaggacacgttgcgcactatgtactttgcttgacatgttttaatgtttagcga

SEQ ID NO: 93189 - DNA, 595 bp, Chicken  19866894411369_1
tttgacaggaggcggtgtgtgaagtgttctatgcaaatggtgtgcctgggataatgaataggataattttttcctcttctgagagtttcaatggaaaggacacctggatttcacagaaaagcccccacagaggaattaaagaaatgttttattcattcatgatgcagactctgtcttatgtgcagattttatcatttcattgtctctgctatctcaaagaagaacaaacagctgggtcctcactagatgcctccatagaggatttattttatttcattattttctctctctcacaagccsccccccccttttttttttcctacgggaaaatgctaacctatttgtatgggaaagaaccaggcaatgcttcatattccccatttcttacccatgctaagggaaggatcaatccagctttggggagtgcaatagtgagagccacatccttttcctgatatactggggtccttcatctcttaagtcttccaagtgctggagtgaggagaggtgaggaccaaacactgccctcagaaggcggcccgtggtgggtacagggcttcagttcagacagcccattgttcaggatgtgtcactg

SEQ ID NO: 93190 - DNA, 600 bp, Chicken  19866894411373_1
caaatgtgtgatgtttatagttttttgaccgtctctgcaacctttgctggagcactgtaagaattagatgacttgatgtttctgaagctgttttcttctgaggaaaaaaaggaaaccaactgaaaaaaaaaaaaaaaaaaaacccacaacattggactgtggagttctgaagactgcacgtgagttcctgctgttaaaccaaatatttctcctcctaaacgtattgagctgcaatatctccagaagtattggctcaaccgcccttaccctgggtgatgcaccatctccctctcgtggtgkcttgatcagagagcagttaaggaaaattctactataacttcagataacagacttcaagctttcaaggctaaagagtgaagattcacaattgcaggcacagtggtcaaagtctgagataatcagtctgggaggcagacagtcactgtttgcatttaagattttttttttatttttattttttgtaatgttcaggatgaattggaaagccttaaactaagaacagctgtaattttcaaacctggaaagaaaataaaaattgaaaaactttcaacatttctggaaggctctttcagcacttta

SEQ ID NO: 93191 - DNA, 600 bp, Chicken  19866894411373_2
tggagttctgaagactgcacgtgagttcctgctgttaaaccaaatatttctcctcctaaacgtattgagctgcaatatctccagaagtattggctcaaccgcccttaccctgggtgatgcaccatctccctctcgtggtgkcttgatcagagagcagttaaggaaaattctactataacttcagataacagacttcaagctttcaaggctaaagagtgaagattcacaattgcaggcacagtggtcaaagtctgagataatcagtctgggaggcagacagtcactgtttgcatttaagaktttttttttatttttattttttgtaatgttcaggatgaattggaaagccttaaactaagaacagctgtaattttcaaacctggaaagaaaataaaaattgaaaaactttcaacatttctggaaggctctttcagcactttatttaactacacaaaagaacaggacagaaataaagtgtaacatacagcataaacaagcaacacaagatgagttttctaaagaaaagaactactattacttgaatttagaataatacttaagtcactaaatccactgaaaattaaaagaaaatactactaa

SEQ ID NO: 93192 - DNA, 600 bp, Chicken  19866894411374_1
gtggtgtgatacctgaagcttgaaaagctctcatattagcggtgttggctaattcagcagcaaagcaattatctcctttggagatgaagacctgtgttcagatgaaattaacttatctttccctaacatggatttgatattgccctagaaagctaagagaaaaaattaaacaatgtaaggtcgcttcatctaaagttttaggactattcctctttacttaatttcttccaatgttaattaaccaacactttttttcctttcaagcaaacaatcaaaaaacccttgtgagtatacctatgkgcaggatacaaatcaaaagagggaaggggtaggctttgagccagatctgataaatgagtggagaagagaagcatgaaggacttgccagctactgaagtccttggagctgatttaatcctgatgttaggcactccttcaaatgtgggcaaacagcccataatgtaaactctggggatggaactgaaattggtggtcacttgcatgtcttgcggcataaaagcaaacttgtggttaaagcttctgtcaggggattaagaaggtctaaagttgaaagcaatgatcttctaggaaaaaataaca

SEQ ID NO: 93193 - DNA, 599 bp, Chicken  19866894411388_1
  misc_feature (1)..(41): n is any nucleotide
nnnnnnnnnnnnnnnnnnnnnnnnnnnnnnnnnnnnnnnnncctctcctacagagaaagtttgaaggagttgggcttgtttagctttcgaagagaaagctccggaaagacctcattgtgaccttccagtacttgaagagagcttaggagcagaaggcagaatctacttcttacgtggtctggtaatgacaggacaaggagaaatggctttaaactgaaggaggagggatttaggttagatgttaggaaaaagctttttagtcacagtgtggtcaggcactgggacatcttacccagagakttgtgataccccatctctggaggcattcaaagccaggctggatgaggccctgggcagcctcatgtagtggttggccaccccactcacggaaggggggttggaattagaggatctctaaggtcccttccaacctaagccattctatgatggctttgttccacctgcccaaagcagctcctaccaataaagcgatgcttcatgttcccagattacctgagctccagacagcttcagtggtcacagctcagaagtcatcagaatagattctggagcagtgttgtcagtttttatttatttaa

SEQ ID NO: 93194 - DNA, 550 bp, Chicken  19866894411388_2
aggccctgggcagcctcatgtagtggttggccaccccactcacggaaggggggttggaattagaggatctctaaggtcccttccaacctaagccattctatgatggctttgttccacctgcccaaagcagctcctaccaataaagcgatgcttcatgttcccagattacctgagctccagacagcttcagtggtcacagctcagaagtcatcagaatagattctggagcagtgttgtcagtttttatttatttaaaagcaaagccatttatccgggcaagaaaacagttgaaggcttaarcttggctataggtgaaagaagtttgtttaaaaacaccacttyaaaatgaagacatttcccatacatcatcgggcaggggagctctggagagggtgctggcaacccaccagctggtggagctctttttaaacagcaacgcaaactgagacaccccaaaagctaacaagggcttcaattcatttaaagaaaaaaataaaatatgcttcaaaggaaaaaaaaattgcccctatgttctagtgacacagtcctg

SEQ ID NO: 93195 - DNA, 508 bp, Chicken  19866894411388_3
cggaaggggggttggaattagaggatctctaaggtcccttccaacctaagccattctatgatggctttgttccacctgcccaaagcagctcctaccaataaagcgatgcttcatgttcccagattacctgagctccagacagcttcagtggtcacagctcagaagtcatcagaatagattctggagcagtgttgtcagtttttatttatttaaaagcaaagccatttatccgggcaagaaaacagttgaaggcttaarcttggctataggtgaaagaagtttgtttaaaaacaccacttyaaaatgaagacatttcccatacatcatcgggcaggggagctctggagagggtgctggcaacccaccagctggtggagctctttttaaacagcaacgcaaactgagacaccccaaaagctaacaagggcttcaattcatttaaagaaaaaaataaaatatgcttcaaaggaaaaaaaaattgcccctatgttctagtgacacagtcctg

SEQ ID NO: 93196 - DNA, 599 bp, Chicken  19866894411390_1
  misc_feature (1)..(157): n is any nucleotide
nnnnnnnnnnnnnnnnnnnnnnnnnnnnnnnnnnnnnnnnnnnnnnnnnnnnnnnnnnnnnnnnnnnnnnnnnnnnnnnnnnnnnnnnnnnnnnnnnnnnnnnnnnnnnnnnnnnnnnnnnnnnnnnnnnnnnnnnnnnnnnnnnnnnnnnnnnnnnctggagatgggcataagtttggcatggatgtttactggagtgactgagccttggaatgggctccttgctcctttctgtctcttgatgtctctcagtcctacctgggccatcttcctggggagctgagagggaaaacgcagttwggaattgcatgggaaataaagccctttgggacaaagttctagcaggacgccctctgctacattcactcctcctattgcctgaattgaatgggctgggtaaaattcttctcttctgcaccctttaattttagcccatccgattctttattttaggtcccggcatcgtgagaactcccagtcccttggcacatcccactgaatcactgacgttcagtggccacctccacccatgcctgtcccctgcctgctccctcgccgggtgtcagttctcgagcctacgtgctgagaagaaaagttaa

SEQ ID NO: 93197 - DNA, 600 bp, Chicken  19866894411401_1
caaatggaaggtgcagagctgtgtaaattccaacttcatacataagaaaaccttctggggagaaacacgcttcaagtttttacccatagcaacctgcccctttttaatggtacttactgcaaggacaccatacaaggtactgaattttgccacttcttcctattatccagtacaggattcggtctgcttgcatctgagctcaggataccccaggtctctgctatgcaccatccctctaggccaataaatcaaacagaagttaaacaagaaagaaacagcaaaggcttagagcacctacayrtttatggtactacggactagttaattactcctgtatctacatccagcatctatagacactggataaaatcacctcaccgtgtctctccaagaggaagagaatctcacagcaacaaactcagcatcagcaagtctctcgctctgcaagtgtagttctaagctcctcagtaacacaacagcctcgctgtttaggtgctccaagcaaaccttcccatctcacgtcagcaaactgcaccaagtcaggcatcccagcagtaaaggcagcaaacagactcctgcagggggctgtcagtgccttcc

SEQ ID NO: 93198 - DNA, 600 bp, Chicken  19866894411401_2
aaatggaaggtgcagagctgtgtaaattccaacttcatacataagaaaaccttctggggagaaacacgcttcaagtttttacccatagcaacctgcccctttttaatggtacttactgcaaggacaccatacaaggtactgaattttgccacttcttcctattatccagtacaggattcggtctgcttgcatctgagctcaggataccccaggtctctgctatgcaccatccctctaggccaataaatcaaacagaagttaaacaagaaagaaacagcaaaggcttagagcacctacayrtttatggtactacggactagttaattactcctgtatctacatccagcatctatagacactggataaaatcacctcaccgtgtctctccaagaggaagagaatctcacagcaacaaactcagcatcagcaagtctctcgctctgcaagtgtagttctaagctcctcagtaacacaacagcctcgctgtttaggtgctccaagcaaaccttcccatctcacgtcagcaaactgcaccaagtcaggcatcccagcagtaaaggcagcaaacagactcctgcagggggctgtcagtgccttccc

SEQ ID NO: 93199 - DNA, 600 bp, Chicken  19866894411413_1
cacattttacagtaggtttgaattagccatagatagttgattttgctcagaagaagatcaaatgtgataccagcataggagaatggcatagggagaaaaggcaacagcattcatatatttgagtaagtaatttaattcatttcagaatgatgtagaatgcaatacaattttttttgtaatacaatattttttattttttttttctttctcaaaagaaagaaaaaattagagtgggaaaaaaaggacaggtaagtaatacaaaccattctatctgttaagtatggaaacttggttgtaatyctatagaatatttcaatattttaaattaaattctgatattttctggtgtttgcagttgcagcctcgtggacatcacagtgaaaagctttcaagttacatcagctgaatatccataaatttcatttacgtacatgaatctaaactaggatgacacataaatatcagtgttaatctgacagattttagtcttgcaaatcagcctgctcacagatactctaggtctttatcccattttattcaagaagttttcagattatctaaaatagctttgcagaggtgacatgggaagttggaatgtat

SEQ ID NO: 93200 - DNA, 600 bp, Chicken  19866894411414_1
actctgtgcaagtttttcttgctctctctgaaaatgatcttttgagttcttttgggccaagggaggaaaaagaaactttaaccagtttatactcgttatatgaatttatacgcgtaagagaaatctcagacaagtcaaaggggacagagaggtgatcacagcccagacaacctgcatttgtaacctattacctaccagatcattgctcagactttacactgtatttactgtttactgaattcccaacttataaatattccccacaaatttggaatgttcttctcacggaatgtaatttgyctgtgagctttcatcttgtgtctggattaattctgaccccttccttcaaccttcacctcttcatttgagtatgttttagagggagagagggacctgccctttgcctcctacaaaccctttgagcaaagccaatttctgcatcatgcattctgcatgctgctctctgccctgcctccacaagacttcagtgttagagaaggtgccagctaaaagagaggtacagccaggagagagttaaagcctttgcctctacttagtaactgccagtgtatattcctgtcattctgctaatgctcataa

SEQ ID NO: 93201 - DNA, 600 bp, Chicken  19866894411414_2
tatgttttagagggagagagggacctgccctttgcctcctacaaaccctttgagcaaagccaatttctgcatcatgcattctgcatgctgctctctgccctgcctccacaagacttcagtgttagagaaggtgccagctaaaagagaggtacagccaggagagagttaaagcctttgcctctacttagtaactgccagtgtatattcctgtcattctgctaatgctcataagagcaaccaatgctcaattaaaaaaaaggagtgactgcagtgttcgcctatttagtgcacagagttccrtaagatrtaatatatcagatgtttggcagtgactttaagctaggtgatctcaacaaatttttcacaaacacatctgaatagattatacagatgcatcacacttgagatccttatgagggtacagtcttttttagaaatcatccctatcttgacttttattaaaccatagtgtattcattatttcttagaggtaaaagcattagtaacagcttgttttgttttcatgcattttggactgggcacccattcacttagaatcgtaattagttgtggaggaggcagatgatttatgaataaagc

SEQ ID NO: 93202 - DNA, 595 bp, Chicken  19866894411414_3
tagagggagagagggacctgccctttgcctcctacaaaccctttgagcaaagccaatttctgcatcatgcattctgcatgctgctctctgccctgcctccacaagacttcagtgttagagaaggtgccagctaaaagagaggtacagccaggagagagttaaagcctttgcctctacttagtaactgccagtgtatattcctgtcattctgctaatgctcataagagcaaccaatgctcaattaaaaaaaaggagtgactgcagtgttcgcctatttagtgcacagagttccrtaagatrtaatatatcagatgtttggcagtgactttaagctaggtgatctcaacaaatttttcacaaacacatctgaatagattatacagatgcatcacacttgagatccttatgagggtacagtcttttttagaaatcatccctatcttgacttttattaaaccatagtgtattcattatttcttagaggtaaaagcattagtaacagcttgttttgttttcatgcattttggactgggcacccattcacttagaatcgtaattagttgtggaggaggcagatgatttatgaataaagcta

SEQ ID NO: 93203 - DNA, 600 bp, Chicken  19866894411419_1
tggctcttcccactctataatgtttctcctggtttcaggagctgtatcaccactacatacaactaggacaggaaaggaaaaccaggcaggtacataggaatcgtgtacctctgcaggtctgtgggaagagagctgtctgccatccattctgctcaaggctgtcaagggtgacaggtcattttagggagcagagccagctccatttagaaggagtgatgaatcccaattcatcactggaggacctgcaagtctgaccctccagatcttattttttacctgttttccatgcttggctcagcmccttccccactgctgcctgttccaggaaaagcatgattctagcattttatctttgggtaaaaacatctatttttgcctctgtttctgatgagacttttttcttgtcacattgtcccagggcagtgggagcaggaggcagtggagagcagaggtgacagcatctgctgcagatgtgcacccagcaatctcaacctgccatcatgatgggaaccagcacacaatagctgaaccaactgatgctcctgatgctctccttttttttttcttttctcctttttcctttcctttcctttcctttcc

SEQ ID NO: 93204 - DNA, 599 bp, Chicken  19866894411426_1
  misc_feature (1)..(41): n is any nucleotide
nnnnnnnnnnnnnnnnnnnnnnnnnnnnnnnnnnnnnnnnnacatccactattttcaacttgataatttgaaatatattatgataccaaagcttgtgtagttcatacgtatatatagttcactttcattttgaaaaaaatatatttcctttttttttttttctccccactctatttctctctttaaagtgctatggagtttaaattaacactgacttctaaacaaaaagatctgaaatctagttaacagtccatttggaggattaaaaaaagtcttatctgtaactcatttttatacacmcattttctgctcctaaatcagcagtgggcatcgcacttcagttatggagttcagatgttccactgctgaccttcagttcaggctctatcacagtatttccaaacttacagaatcaattcagcagtggattagtagatttgggataacacatggtaaaaactgtctccaaccataatgctctccaagtacagaattaaatcaattagtactcaggtcacttattaagctcccccagaatgaactaaaggaggaaagaagcaactaagaaaaacactgcatcacaaaaagaaaaatttcca

SEQ ID NO: 93205 - DNA, 600 bp, Chicken  19866894411428_1
ctctggaaaggaaaaggatactttaagtttttgaaacgtttgagggagttgtatatgtattatctaggtatgtatgtgaacgtggcacttggttatttcatatctggatactggatgcctgcttcttttaagtctagatgtgtctagttcatatttatcctactggagccattaacactatgttaaaggagtgtttttttttaaatttcttgagttctgcaggaaaatagttgttacacattgtaaacataatgtggaacatatttaatgtgcaactttttataaaacttttaaaacatmtttctttttaactgaaattaaccaaactattctagtttgttgcttaaagttgcaagagaatttaaagatttagcattagtactacatttaggtctctgttggaggtctccaattcagataaagttacctgtttgcatagaattctcacaaggcagctcttggggctgcagtaaagtataaactcagtactcttaaaattgaacaggacagcatccatgagctggtcagcacatatagcagaaggtaggaaagttaggaggagtgtgtgacatttctttaataatgtatcaaatgtgtatg

SEQ ID NO: 93206 - DNA, 600 bp, Chicken  19866894411434_1
cagaccaagagggtgaaattcaaacagtttctttttccttactgaggcagtgcttcaggtacacaaaagacagcagagtgtctgtatcagaagctgccagcactacaaagggtattgttcctgctgcttcccatggaacaaaggcacacatacaggaatcacaggatgtgataaaaaagaggagatagccaagagctaacaggaagtggcaaaaccattcatatacattttctttgtgtaatatctaatatccttgcttcagatacgtaaagtgctcttttggccaagaaaaaatcagaycagattcaagtacagaaaattaaaaaaagattgtttgacatctatttcctctgtgccacagaaacatgaggctttcaaatagaaatccaccaaaaataggtgaacaagcaatgtattagaaagtctgtaaccagaaattgttctggtaaacctgtccttacattagttatgcagataacttgcacgtgctcttacaataatcagcatttccatggatttctgtattacctgcagagcactagggctgattaggacaaagtttaatttggtccttaatcagctccagggaagtggaccgcg

SEQ ID NO: 93207 - DNA, 600 bp, Chicken  19866894411438_1
ttctgtccttccatgtcttgcagatcttgcagagtgaatgaagaggaaaagtgcggtttcccctagtattccctgctgatgtgatgtactgtgagggtacgtaggaagccccaaacctgttaatatgtattctgcatggtgagtaaatgtgctatatttaatttccattgaaacagtgcttctctctgaggcttcctacataccttcatgtctcgtccatcccctctcaacctcactccttgctcttcctgacttcctgctgccatcacatcagtcacagctgtgtcccaacagtacttstgccccaatyccatatccctgtgcttcctgttgtggaattcaggtcttcttgcaattttatcttaggaaaatatttaagaatatacatatttaattgtaaaatgaatctaaagtcccagtcccccagttggttatgtgcctcagtttccccattattgctgggggagatgccattaactcacatcacagttgcacgatgagttcccacatatgcacataatgtccttgggaaaatgccactgacttctccagaggtctgaattgcctcactttaattttagctggattcattcataacct

SEQ ID NO: 93208 - DNA, 600 bp, Chicken  19866894411438_2
ccatgtcttgcagatcttgcagagtgaatgaagaggaaaagtgcggtttcccctagtattccctgctgatgtgatgtactgtgagggtacgtaggaagccccaaacctgttaatatgtattctgcatggtgagtaaatgtgctatatttaatttccattgaaacagtgcttctctctgaggcttcctacataccttcatgtctcgtccatcccctctcaacctcactccttgctcttcctgacttcctgctgccatcacatcagtcacagctgtgtcccaacagtacttstgccccaatyccatatccctgtgcttcctgttgtggaattcaggtcttcttgcaattttatcttaggaaaatatttaagaatatacatatttaattgtaaaatgaatctaaagtcccagtcccccagttggttatgtgcctcagtttccccattattgctgggggagatgccattaactcacatcacagttgcacgatgagttcccacatatgcacataatgtccttgggaaaatgccactgacttctccagaggtctgaattgcctcactttaattttagctggattcattcataacctccaacgttct

SEQ ID NO: 93209 - DNA, 599 bp, Chicken  19866894411446_1
  misc_feature (1)..(7): n is any nucleotide
nnnnnnntgaagtgaattcaactgaggaaaaagtggatgaaaagagagaattcatcaggtaaatgcatagtttctgttgcaaggagggaaatgagcattgttgggctgtgtttgtactaattgtccctctaatctcagtcaaccactttgtttaaataaatgcatatgagcatattaaagatgtattgatcattacgggcaaattatgtttccctattgacattacacgtggtagcagggcaatctcaaaagtcatgtctcctcttctgttgtgttggcccacaatgccagagacagtawggcggtatggcagcagagatggaaccttccgaccaatatcccgttccattttatggctgtgtgacagatggcagcagagaggcagttcgacaaaatggcctctgacatggaagggtgtatgaagcgaaggtgtggaattaaatttctccatgtggaaaaacatggcggccactgacattcgtcagtttttgctgaaaatttatkaagaccaaacaasacaagacgtgagcacagtgaggtgtttcagcagtgaaagcagcaacgtgagagagaagccacattacagatggccgtgcaga

SEQ ID NO: 93210 - DNA, 600 bp, Chicken  19866894411446_2
tatgtttccctattgacattacacgtggtagcagggcaatctcaaaagtcatgtctcctcttctgttgtgttggcccacaatgccagagacagtawggcggtatggcagcagagatggaaccttccgaccaatatcccgttccattttatggctgtgtgacagatggcagcagagaggcagttcgacaaaatggcctctgacatggaagggtgtatgaagcgaaggtgtggaattaaatttctccatgtggaaaaacatggcggccactgacattcgtcagtttttgctgaaaatttatkaagaccaaacaasacaagacgtgagcacagtgaggtgtttcagcagtgaaagcagcaacgtgagagagaagccacattacagatggccgtgcagatctttttgactgtggcatgcaagcttttgatcatcacttgtgaaagcacacagctagtggtggtgactatgttgaaatttctgttttgtggctctgaatttgctgtctcaagtagtgttatcatgctctttgtatttgctgtagtttccatggaaataaataggagacattagttttggagttacctacrtgtattaggtcactg

SEQ ID NO: 93211 - DNA, 600 bp, Chicken  19866894411446_3
tgacattacacgtggtagcagggcaatctcaaaagtcatgtctcctcttctgttgtgttggcccacaatgccagagacagtawggcggtatggcagcagagatggaaccttccgaccaatatcccgttccattttatggctgtgtgacagatggcagcagagaggcagttcgacaaaatggcctctgacatggaagggtgtatgaagcgaaggtgtggaattaaatttctccatgtggaaaaacatggcggccactgacattcgtcagtttttgctgaaaatttatkaagaccaaacaasacaagacgtgagcacagtgaggtgtttcagcagtgaaagcagcaacgtgagagagaagccacattacagatggccgtgcagatctttttgactgtggcatgcaagcttttgatcatcacttgtgaaagcacacagctagtggtggtgactatgttgaaatttctgttttgtggctctgaatttgctgtctcaagtagtgttatcatgctctttgtatttgctgtagtttccatggaaataaataggagacattagttttggagttacctacrtgtattaggtcactgctagatcacacag

SEQ ID NO: 93212 - DNA, 600 bp, Chicken  19866894411446_4
tgctgaaaatttatkaagaccaaacaasacaagacgtgagcacagtgaggtgtttcagcagtgaaagcagcaacgtgagagagaagccacattacagatggccgtgcagatctttttgactgtggcatgcaagcttttgatcatcacttgtgaaagcacacagctagtggtggtgactatgttgaaatttctgttttgtggctctgaatttgctgtctcaagtagtgttatcatgctctttgtatttgctgtagtttccatggaaataaataggagacattagttttggagttacctacrtgtattaggtcactgctagatcacacagacatattcacagtcaatggacttgatgtgacttgaactgtataatgtaaaaataattttagactagtacattgtcttgccctcttggcaagttttatcagcttttttagtttggattaattcttgttacggcattatcttaacaaatatttatgtatttcttctcttgagtttcgatgaaggatgtgtgtaggataatgctgagtgggaagctgaagtatcattgcataatacttcagaatagtattttcttgcttatgagtgactgcaaac

SEQ ID NO: 93213 - DNA, 600 bp, Chicken  19866894411447_1
tcttaaaaaaaataaacagatgctgttttcttctgtttaattcatctgcaagtgatacatgaggttggaaagtggctaaagcctgaaaaaatgatgaatgtctctcttctccattacatcatctctggcagttggctggaggagaaggatgcctcttcattgtcttttttcctttacttcttagagaccattcactattcataaataagaaatgaagaacaacttttattgcagttgctttttatataagttgttgggaatccatgaaagcatatattttgatctctcttcatggctcarcactaatggcaaagtcgcactcaaaacctccaaagcaaaattaggaaatgagacgtgtacttaggccatatgtttgttagcttttcttttactaaggtagcaaacgagttcataaatttttaactatccctgcagactcttgcttgaaatgacaaataaaagtctctctgcaagtgtaccctacttttgaaacaactttccttctttttttcttctgaaggtaaaagatgcaagcttatgtggtaggaatcaaaatttctacaatagaagctgtgcttcagtgctcattcttccccaaaa

SEQ ID NO: 93214 - DNA, 600 bp, Chicken  19866894411449_1
tgactaatgaatgcaagttttttctacatgaaaataattttctgagcactttgtgaacttggtgctttattactaaaatacgcttttaaaaatcatgattaatgggtacacgcaggcattctccagcagcataaagattgcatgtggaagcctatctcccctttcacctatgcatttcaaaactgcaaagggccactaattcctaatgtctctaaactgtgccacaggaaaactggcatgtgctattcatcatcaacatttaaataatttttattttttcaagttcctgggcttatgtakctccttcctgatattaaaaaaacacactttgcagaatactttgttagtatagcaagttaaaatcctcaaagatttaatctatactgtagcatgaggagaactactgatctgcttcccacagaagtcaatgaattcaataaaacatcaaaaggcagtttgctgggttatctatcacctctctaggcaaagaacgcaaaggttacaaaaaatacaagctgtttaacagcaccagattattgagatactgacagtgattacactgccatgataaacaatgagggctagcgcattttttgtggg

SEQ ID NO: 93215 - DNA, 600 bp, Chicken  19866894411449_2
tgaaaaaaacaaaacaaaccaaaacaaatttaagagcatgatcttttcaaacccagcattatacaaaacacctcttcaccttcagctgcctttagcttctcagaagttattagtgtctccctagttataggaaagatttaacacacttaggctcaaacctttaaattcttttaatcagttaattaatataaatatcagaagtaaggagccagaataaaactatcttaaatatctgtctacaaataaatgtcctacaccatgagcaaaacacaaacagaacgagggagcacaaacagaacragggagcacaaatgtctatgcagaatgcagaaatatatcagcactaacaattatttattggactgtcaatgacragtcaaattcagggataagtgcagatcgctttacaagatctgagctgtaacccttcaaatgaagcaacccagcacagcacaaggtgctgcaacagtttcagcaccatgaaggacttatctgtcccaccgggaatgctatcgcacacttccaatttttaaagacamctttctttccccataaatttgattaacattttcaattaatgataaaagtaattcagaaaaa

SEQ ID NO: 93216 - DNA, 559 bp, Chicken  19866894411449_3
ttcaccttcagctgcctttagcttctcagaagttattagtgtctccctagttataggaaagatttaacacacttaggctcaaacctttaaattcttttaatcagttaattaatataaatatcagaagtaaggagccagaataaaactatcttaaatatctgtctacaaataaatgtcctacaccatgagcaaaacacaaacagaacgagggagcacaaacagaacragggagcacaaatgtctatgcagaatgcagaaatatatcagcactaacaattatttattggactgtcaatgacragtcaaattcagggataagtgcagatcgctttacaagatctgagctgtaacccttcaaatgaagcaacccagcacagcacaaggtgctgcaacagtttcagcaccatgaaggacttatctgtcccaccgggaatgctatcgcacacttccaatttttaaagacamctttctttccccataaatttgattaacattttcaattaatgataaaagtaattcagaaaaaaaaaccctgcaagttactgcacctgctcagctg

SEQ ID NO: 93217 - DNA, 394 bp, Chicken  19866894411449_4
caaataaatgtcctacaccatgagcaaaacacaaacagaacgagggagcacaaacagaacragggagcacaaatgtctatgcagaatgcagaaatatatcagcactaacaattatttattggactgtcaatgacragtcaaattcagggataagtgcagatcgctttacaagatctgagctgtaacccttcaaatgaagcaacccagcacagcacaaggtgctgcaacagtttcagcaccatgaaggacttatctgtcccaccgggaatgctatcgcacacttccaatttttaaagacamctttctttccccataaatttgattaacattttcaattaatgataaaagtaattcagaaaaaaaaaccctgcaagttactgcacctgctcagctg

SEQ ID NO: 93218 - DNA, 599 bp, Chicken  19866894411451_1
  misc_feature (1)..(11): n is any nucleotide
nnnnnnnnnnncttctttcctgccacagacacaggtggaaagtataaaaacaaggcttttcacagcagctgcaggtgtttgcttgtgttagcagtcacaaggagtaagagtttggaggtacgttggctaatttagtgtcagtgtgctcttaaatgagaaacatttcactcttgaggcataagtaaaatagttaatgcagtaagcattactattgaaacgtagttctagttaacataagaaatggtttaaagcttgatagctactttatagctcctcatccacgtcaccaagaagtgatgktacagctggtgatgtcagcagggctgggcctggctgctctgggactcrcacaaagatcagagtggtggtgattcrtcacgctggtgtgtgcagctgtgtgatgagggctgtgtgaaggtgcacgagggcacggccagaagcaagaacttggtggtggtattttccaaagcagccaggtaattttggagcctgagctcccatkaatagcatttaaaaccactgttctcgtgaatttgaagtgttgccatccttcttttcaaaaaactaggctttgytgtggaagcccrgtgcaacatcca

SEQ ID NO: 93219 - DNA, 600 bp, Chicken  19866894411451_2
aacaaggcttttcacagcagctgcaggtgtttgcttgtgttagcagtcacaaggagtaagagtttggaggtacgttggctaatttagtgtcagtgtgctcttaaatgagaaacatttcactcttgaggcataagtaaaatagttaatgcagtaagcattactattgaaacgtagttctagttaacataagaaatggtttaaagcttgatagctactttatagctcctcatccacgtcaccaagaagtgatgktacagctggtgatgtcagcagggctgggcctggctgctctgggactcrcacaaagatcagagtggtggtgattcrtcacgctggtgtgtgcagctgtgtgatgagggctgtgtgaaggtgcacgagggcacggccagaagcaagaacttggtggtggtattttccaaagcagccaggtaattttggagcctgagctcccatkaatagcatttaaaaccactgttctcgtgaatttgaagtgttgccatccttcttttcaaaaaactaggctttgytgtggaagcccrgtgcaacatccagctccttccattgaaaaacctggtgtaaggaacagggccgatggtgttc

SEQ ID NO: 93220 - DNA, 600 bp, Chicken  19866894411451_3
tgtttgcttgtgttagcagtcacaaggagtaagagtttggaggtacgttggctaatttagtgtcagtgtgctcttaaatgagaaacatttcactcttgaggcataagtaaaatagttaatgcagtaagcattactattgaaacgtagttctagttaacataagaaatggtttaaagcttgatagctactttatagctcctcatccacgtcaccaagaagtgatgktacagctggtgatgtcagcagggctgggcctggctgctctgggactcrcacaaagatcagagtggtggtgattcrtcacgctggtgtgtgcagctgtgtgatgagggctgtgtgaaggtgcacgagggcacggccagaagcaagaacttggtggtggtattttccaaagcagccaggtaattttggagcctgagctcccatkaatagcatttaaaaccactgttctcgtgaatttgaagtgttgccatccttcttttcaaaaaactaggctttgytgtggaagcccrgtgcaacatccagctccttccattgaaaaacctggtgtaaggaacagggccgatggtgttcagaatgcaagtaggctttcagttctgc

SEQ ID NO: 93221 - DNA, 600 bp, Chicken  19866894411451_4
gcattactattgaaacgtagttctagttaacataagaaatggtttaaagcttgatagctactttatagctcctcatccacgtcaccaagaagtgatgktacagctggtgatgtcagcagggctgggcctggctgctctgggactcrcacaaagatcagagtggtggtgattcrtcacgctggtgtgtgcagctgtgtgatgagggctgtgtgaaggtgcacgagggcacggccagaagcaagaacttggtggtggtattttccaaagcagccaggtaattttggagcctgagctcccatkaatagcatttaaaaccactgttctcgtgaatttgaagtgttgccatccttcttttcaaaaaactaggctttgytgtggaagcccrgtgcaacatccagctccttccattgaaaaacctggtgtaaggaacagggccgatggtgttcagaatgcaagtaggctttcagttctgcagaataaaatctaagagtcactgctgcgttatcgcagccaaaaaatactcagtggagtgttataccagtaacctcagtctgtagttaatgtgcaccatagcaagggttaaatgaactggaaagctcc

SEQ ID NO: 93222 - DNA, 600 bp, Chicken  19866894411451_5
catccacgtcaccaagaagtgatgktacagctggtgatgtcagcagggctgggcctggctgctctgggactcrcacaaagatcagagtggtggtgattcrtcacgctggtgtgtgcagctgtgtgatgagggctgtgtgaaggtgcacgagggcacggccagaagcaagaacttggtggtggtattttccaaagcagccaggtaattttggagcctgagctcccatkaatagcatttaaaaccactgttctcgtgaatttgaagtgttgccatccttcttttcaaaaaactaggctttgytgtggaagcccrgtgcaacatccagctccttccattgaaaaacctggtgtaaggaacagggccgatggtgttcagaatgcaagtaggctttcagttctgcagaataaaatctaagagtcactgctgcgttatcgcagccaaaaaatactcagtggagtgttataccagtaacctcagtctgtagttaatgtgcaccatagcaagggttaaatgaactggaaagctcctagaaaaaaagctcatacagtgcagtttttgtttatactgaaatgttcccatatgtttcagttaatgcagaac

SEQ ID NO: 93223 - DNA, 600 bp, Chicken  19866894411451_6
caagaagtgatgktacagctggtgatgtcagcagggctgggcctggctgctctgggactcrcacaaagatcagagtggtggtgattcrtcacgctggtgtgtgcagctgtgtgatgagggctgtgtgaaggtgcacgagggcacggccagaagcaagaacttggtggtggtattttccaaagcagccaggtaattttggagcctgagctcccatkaatagcatttaaaaccactgttctcgtgaatttgaagtgttgccatccttcttttcaaaaaactaggctttgytgtggaagcccrgtgcaacatccagctccttccattgaaaaacctggtgtaaggaacagggccgatggtgttcagaatgcaagtaggctttcagttctgcagaataaaatctaagagtcactgctgcgttatcgcagccaaaaaatactcagtggagtgttataccagtaacctcagtctgtagttaatgtgcaccatagcaagggttaaatgaactggaaagctcctagaaaaaaagctcatacagtgcagtttttgtttatactgaaatgttcccatatgtttcagttaatgcagaacgtaattgggtct

SEQ ID NO: 93224 - DNA, 600 bp, Chicken  19866894411463_1
tttgctcacagttacatccatcttcccagggatgacacaacctccttgccccatgacttccaaagaaagcagatttcccatgcaccgatgccacctgtacgtgagttttcagccctatttctcccagtgcagggagcgctccctgctctgtacgaggccctttccttgcagacacactgccattcacgtctgttttctgttccccttggctgcctctcgctgctctcccccagagctccgcgtcagcgcttctggcagaagtggggaactcatggctttgagacgctcccatttcacgcrgagtttatctccctctgactgacagctgcgtggaccccgtccaagagcttcaggtttgcttccccacttcctgatgtcctcttatgtcagacacaagattcattctcctgccaatacccagaggtctggagcacagaacgcgcctgtcgtgctctgcgtctccgccagctttgatggacgtatgggatatgaaatggacactttcttccttgggagaaaaaaagggactttattttaactcgcttgcccctcacttaaagtggcatctgtcagaaggcagcatgagacacagaggtggaa

SEQ ID NO: 93225 - DNA, 600 bp, Chicken  19866894411463_2
cttgcccctcacttaaagtggcatctgtcagaaggcagcatgagacacagaggtggaaagaagtgaaagagaggcatggaaaactggagcaaaatgagaggcaaagaagatgaatgaagataaacaagcgcaaataaaaagaggagaaagggctggaaatcttgagctattccatggatgaacaacagacaccaaaccctgctgatgagaagcaacttcaaatttcaaccaacccatgaaggaaaggagttgtggatgaggttaaggagtggaggagaacacagaggggaggtggtctcyrtggacctgtgtggtgcagagcactcaatccatgtgggaccaagttggratgggcagcgacaacagcactgtgctcccagagcagcccttgtaactgggacacaatgaaacaagataaaggggagagccaaggcaaacagaacttgcctactttcaacatttattcctatatatttttttagaaaaagaaaatacagactaagcacataaatggacaagacttacttagctaagtcatttttttcccctcccttgcaccactttggaaaataaatagttttaaataatttttttcttcaa

SEQ ID NO: 93226 - DNA, 600 bp, Chicken  19866894411463_3
ttgcccctcacttaaagtggcatctgtcagaaggcagcatgagacacagaggtggaaagaagtgaaagagaggcatggaaaactggagcaaaatgagaggcaaagaagatgaatgaagataaacaagcgcaaataaaaagaggagaaagggctggaaatcttgagctattccatggatgaacaacagacaccaaaccctgctgatgagaagcaacttcaaatttcaaccaacccatgaaggaaaggagttgtggatgaggttaaggagtggaggagaacacagaggggaggtggtctcyrtggacctgtgtggtgcagagcactcaatccatgtgggaccaagttggratgggcagcgacaacagcactgtgctcccagagcagcccttgtaactgggacacaatgaaacaagataaaggggagagccaaggcaaacagaacttgcctactttcaacatttattcctatatatttttttagaaaaagaaaatacagactaagcacataaatggacaagacttacttagctaagtcatttttttcccctcccttgcaccactttggaaaataaatagttttaaataatttttttcttcaat

SEQ ID NO: 93227 - DNA, 600 bp, Chicken  19866894411463_4
gaggtggaaagaagtgaaagagaggcatggaaaactggagcaaaatgagaggcaaagaagatgaatgaagataaacaagcgcaaataaaaagaggagaaagggctggaaatcttgagctattccatggatgaacaacagacaccaaaccctgctgatgagaagcaacttcaaatttcaaccaacccatgaaggaaaggagttgtggatgaggttaaggagtggaggagaacacagaggggaggtggtctcyrtggacctgtgtggtgcagagcactcaatccatgtgggaccaagttggratgggcagcgacaacagcactgtgctcccagagcagcccttgtaactgggacacaatgaaacaagataaaggggagagccaaggcaaacagaacttgcctactttcaacatttattcctatatatttttttagaaaaagaaaatacagactaagcacataaatggacaagacttacttagctaagtcatttttttcccctcccttgcaccactttggaaaataaatagttttaaataatttttttcttcaatccaaggcccgtacgtacactgacagcaaacctttaagagctgcatttt

SEQ ID NO: 93228 - DNA, 536 bp, Chicken  19866894411463_5
cgacaacagcactgtgctcccagagcagcccttgtaactgggacacaatgaaacaagataaaggggagagccaaggcaaacagaacttgcctactttcaacatttattcctatatatttttttagaaaaagaaaatacagactaagcacataaatggacaagacttacttagctaagtcatttttttcccctcccttgcaccactttggaaaataaatagttttaaataatttttttcttcaatccaaggcccgtacgtacactgacagcaaacctttaagagctgcatttttccccccyttttttcttcttcttcttcttttttttttctgctgctgtaattatggtctcattaagattccaataaaaaacagtcaagaaaactatttttttcttcttcttttttttttttttagagaaaacagaagtgcccacagtgtctctctacatgttacgcttttaaaatatttgcatttgaaattcctcactgcaaataattccaagccaaatgtaaatataacacttagattactccc

SEQ ID NO: 93229 - DNA, 600 bp, Chicken  19866894411466_1
tgaggccctggaatgtatccaaagaagggcaaagaagctgtgaaggatctggagcacaagcgttatggggcgcagctgaaggaactgggatggttcagtatggagaaggaggtggctcaggggagaccttattgccctctacaactgcctgaaaggaggttgtagcaaggtgggtgtcagaggtatcttttcccaggtaacagcaataggatgagacctaatggcttaaaccaggggaggtttgggttggatactaggaaaaacaacttcgcagaaagagcaatgaggcactggtgcagkcagaggtggtggagtcaccatccctggaggtgttcaagaaatgtgtagatgtagcactgagagacatcgttagtgggtgtggtgggggtgggttgatggttggagtagatggtcttagaggtcttttccaaccttaatgattctacggttctaagagtgatgccaggaccaatccaatttttaagtaaattagccttaacttacatgtaatgaagaataagaattctgtctcattacaagctgagttgctttctataaatctctctyctgtttccctcaggcatactggggcacaccctt

SEQ ID NO: 93230 - DNA, 490 bp, Chicken  19866894411466_2
ttcgcagaaagagcaatgaggcactggtgcagkcagaggtggtggagtcaccatccctggaggtgttcaagaaatgtgtagatgtagcactgagagacatcgttagtgggtgtggtgggggtgggttgatggttggagtagatggtcttagaggtcttttccaaccttaatgattctacggttctaagagtgatgccaggaccaatccaatttttaagtaaattagccttaacttacatgtaatgaagaataagaattctgtctcattacaagctgagttgctttctataaatctctctyctgtttccctcaggcatactggggcacacccttttaaagacaaaattgaggctatctccaggatatctaatgtacaaaaccagtcaaagtcactctagctctcctggagagaagcaggactaaagaaatgttggtggtaatttaagaagcaaaataaaggtagcctttaaaaatactagtagaaaaaagg

SEQ ID NO: 93231 - DNA, 568 bp, Chicken  19866894411480_1
ttaattttgcctggcaggaacactcttgctttctgagctcttagaaatccatcagctgccatcagtacagcatgataaaggccagtcccagagaaaaagcagcacatttgactgcagtaagagcacataggttaagaaatgcttgccatttttcttttatcctaaagaaaaaaaaacccaaacctatggattttgcatttctccaaggtgacatagagcccttgagcaatgctgcagttcacattacaaattaaagtaatcaaaaactggcattagttatgccgatgaccaagacgtaayggtctgcaatggcagagaaccagacccagtgacccaggtcttactaaagagaaaacctagaggattattgaataggaacggatgaatatgacaaaatctgtgtgtgtgtcatgctggctgtcccatggcaagagaacagcccatgttttacgcttcccaatgcattagcaagtctttaatcacatcccctcatgcagtttttcctctgctccaactcagcctatctcatgggacagacagcgcgaaacaatcacttcagtctgctgaa

SEQ ID NO: 93232 - DNA, 600 bp, Chicken  19866894411481_1
gttccaattgcttatccaaacatttgtacaagtgcttttttcttgacttcactcatgtgctcttagattctttgtggctttgctttttctgtagcctgaagaggtgaacaacttgaagcatggtataaacagcattcactttgctacacagtgccgtgtattccagtgcatgtgtggaactggaaggcaatcataataacaataacaaaagaaggcactattaattattcatcaatgacagtatcaggagtaggaaattctagttttaatgtcccagtattacaagggagatgttttccratgtagtaatttttcktctgcaattttgagagtgtgttaggcacaagtagctgaagatgacagaattaaccattcaggtcttacaactttgtctatttttttttcttgtacaaacacttacataaayacttaacattctctttgcttggaggttgctgctatagcttaacttgtcatggtgaactaatacataatagcaattcaaattccattctgttttaggtttcagcagtgaaaaaatcaaaattttagaagtggcaacgtcggtaaaaataaaataggctaaggctgttctatcta

SEQ ID NO: 93233 - DNA, 600 bp, Chicken  19866894411481_2
caaacatttgtacaagtgcttttttcttgacttcactcatgtgctcttagattctttgtggctttgctttttctgtagcctgaagaggtgaacaacttgaagcatggtataaacagcattcactttgctacacagtgccgtgtattccagtgcatgtgtggaactggaaggcaatcataataacaataacaaaagaaggcactattaattattcatcaatgacagtatcaggagtaggaaattctagttttaatgtcccagtattacaagggagatgttttccratgtagtaatttttcktctgcaattttgagagtgtgttaggcacaagtagctgaagatgacagaattaaccattcaggtcttacaactttgtctatttttttttcttgtacaaacacttacataaayacttaacattctctttgcttggaggttgctgctatagcttaacttgtcatggtgaactaatacataatagcaattcaaattccattctgttttaggtttcagcagtgaaaaaatcaaaattttagaagtggcaacgtcggtaaaaataaaataggctaaggctgttctatctacacacgagaatgaact

SEQ ID NO: 93234 - DNA, 600 bp, Chicken  19866894411481_3
aacagcattcactttgctacacagtgccgtgtattccagtgcatgtgtggaactggaaggcaatcataataacaataacaaaagaaggcactattaattattcatcaatgacagtatcaggagtaggaaattctagttttaatgtcccagtattacaagggagatgttttccratgtagtaatttttcktctgcaattttgagagtgtgttaggcacaagtagctgaagatgacagaattaaccattcaggtcttacaactttgtctatttttttttcttgtacaaacacttacataaayacttaacattctctttgcttggaggttgctgctatagcttaacttgtcatggtgaactaatacataatagcaattcaaattccattctgttttaggtttcagcagtgaaaaaatcaaaattttagaagtggcaacgtcggtaaaaataaaataggctaaggctgttctatctacacacgagaatgaactccaagttctttttttctttctttctttctttattattattattattttttaggggaatatactgcaatatactttttaggggaaaaatattttacttttactgttgttgtt

SEQ ID NO: 93235 - DNA, 600 bp, Chicken  19866894411487_1
tgggtcagtgcgagcaaaacagctgctatggatcactgtctcacacagaacaatgatgagagtaagccaaagggatgcggagctgcaatagagaccgctgtgccaggtgccgtgagaaaagctgaaagcaactgcaagttatgagaaccgtgccttattgtacttaaaacgttatttgtaccactctgtataaatggctgtgtggtgtcattaaatggcttggctacaagaaatcatattggtgtgtggcctcgtcactcaccacacctcagctgattttggctttccaggggctctcgkacttgttgtatgacaaaacctgggccttccccaggcaaagaaatcctctcctgagagtgacattctttgagcattcccattcacatgatgttctcaagggtcaaggagatctgtgtaaggagaaacacatcaaggcagggactgatggtcatcggtagtggaggaatatctaggaatgtcttcctctcctttaagagagtgtggttgaatgtctgcagtgtgcactgacctccaataacctgaggagtgatggagtctccctagcttcttctcacaaaaggcatcgctttctactttgca

SEQ ID NO: 93236 - DNA, 600 bp, Chicken  19866894411489_1
gagctaaagtctttgtcccaccagctctgtggccctactttatgcatgagggtcacccagagtgttgcgtatctttatgcaccttcctacagcccttaagaccacacagataagcatcaatgccaacaacacaaatgtatcagcctgacattccctctcctatagtaggggggagcttgaaattttgtgggcatgtgaaagctaccacagctgaaaatctctgaaaaatataaggaaaggtaaatgcaaggatgcaagaggctccttcctttagaagatagttgctcagttttgggccargtaatgttttttcaattcattctgttgcttctgccttccttactgatgtagatttcttttcctgttacatgtatggtgttccttgccatcgcaatgcaaaccaccaattatggaagctggccaagaaacaagggagcttaaatgaaacagcagtccccaggacttctcacaggcaatggcatgaggggagaggtgcatgttggttatagaagctgacctgactttccattgcctgattagttttcttctcagcatacacgtgttagagctgtttggggtcagtattctctgtgtctctgg

SEQ ID NO: 93237 - DNA, 600 bp, Chicken  19866894411489_2
agtctttgtcccaccagctctgtggccctactttatgcatgagggtcacccagagtgttgcgtatctttatgcaccttcctacagcccttaagaccacacagataagcatcaatgccaacaacacaaatgtatcagcctgacattccctctcctatagtaggggggagcttgaaattttgtgggcatgtgaaagctaccacagctgaaaatctctgaaaaatataaggaaaggtaaatgcaaggatgcaagaggctccttcctttagaagatagttgctcagttttgggccargtaatgrtttttcaattcattctgttgcttctgccttccttactgatgtagatttcttttcctgttacatgtatggtgttccttgccatcgcaatgcaaaccaccaattatggaagctggccaagaaacaagggagcttaaatgaaacagcagtccccaggacttctcacaggcaatggcatgaggggagaggtgcatgttggttatagaagctgacctgactttccattgcctgattagttttcttctcagcatacacgtgttagagctgtttggggtcagtattctctgtgtctctgggatcagc

SEQ ID NO: 93238 - DNA, 600 bp, Chicken  19866894411490_1
ctggccgcagcgctgcgaggcgaagggacccgcagtgagggctgtgagctcagcaggacgggcaccacggctgcctgggggtggtgaacagctgggagctgcaaggacgatgtgctgggcctcgcagggagacgcggtcctttctgaagctgcgacaggagaggattaatgctttccattacacggatctatgggatacacctcattatctgacttggaatgtatctgggttttggcagccttaataccttaattgtcttagttcctacaaggagatcgccaggtggcttgtcgtcatgwaaatgaaaaacacgtagtttcttattcataggcaacatatcatcccaggagctaacctggcagggcgttaaaatgcccactggaaaggagtggccggtgggtgctcacagctctgcagtgccctgcagcccctgctgactgctccctgcgccgctgtggctctcatcagccagatcccttcagcacaaatgctgcccactcttgcagcttccagtgggagcgtctgagctgagctgaattcagcagttaatactgaacaagtgactgagtggttctcgcagcttgtgccttgcagcgagc

SEQ ID NO: 93239 - DNA, 600 bp, Chicken  19866894411496_1
atttgccccatgtcagatcagagctccagttgctccaaaggaatgcactgtcaagaagatctgagctgtgagtgatgctgggtgtgctctgggacagcagatttcagaaagggaaaaactgcagtgcaatagcagctgggagagaggggtgagagatgtgagagcagccctgcaggcactaaggtagtgcagaaggagggcagaaggagctccaggcacacagcagcagctccttgcagcccaggaatggccctcggtggagcaggccatccccctgaagcccatgggcactgcgtagarcagatctccccatgcttccatggaggagcctgcggggcagcctgggccagaactgccacctgtggggatccatgtggagctccatggtatggagctgcattggagcagtgctgggagagctgcagcctgtgggaagcccacacgggatcagttcaggagggactgtgggtgggacccacatggagaggaggcagagtgaccatggaggagcagcagaaacaaagcgttatgtatggactaactgcagcctccatttgcaccaactggggaaaggggatagaagaaagtggatgaaggaaa

SEQ ID NO: 93240 - DNA, 599 bp, Chicken  19866894411506_1
  misc_feature (1)..(20): n is any nucleotide
nnnnnnnnnnnnnnnnnnnncagaatagaaagcactgctagccatgagatgagcagagttttgggacgtagcacctcccagtgagcagctggcagcacagggcctctgtagcaggcacgagactcacacagctgctgcacgccatggcctcaagtgctgctcagctgcagcccacagcctgttttgtgctctcttggaagaagggaaacggacattgggagaactctggatacacggggaaaacaatgcacatgtccatagctgtttcagctgcttctgcccaaagtcacaagttttcayattgcaaagagtaagagcacaggaggccaacttgtagattgggtcgtgctgcttcggcagctgctctctccctctgctttctctctgttggcaggaggagcatacagagtactgcaattcccagaactgcccaggccttcccatgattgggcttcagacatcaatatgttgtctcacatgttctgttggtatttttttttttaatgcctgagatatatttaatgtttgcattacagattcgctatctcaacacctcctcagttgtcaccagcacctctcaccaaggctcacacccctca

SEQ ID NO: 93241 - DNA, 599 bp, Chicken  19866894411507_1
cctcttggaggtgcatacctttcctttacagttcttacagcacagtgtttttgatccaggatgtgtagggttaccagcatggttttaacaagtgagcttaagcaccagtagttttcttaggggcatttcctctttcttggcagcattaggacagcgtttaacatactgggctcacagtacagattagtgggatagaaaagcagaagcactgttttcccagtctaagcaacacagaagagaaattacaaggagttggtggaggggagaagagcagaaggaggaggggagctttgggaaacygaaggttttaaacttcatctgtttcatgcatgcgtatcccctgcaggaatgttcagcatgttgtcatttgccatttgtgagaagagctgtgaggctgtgctgggctctgactgctccttttctctccaaaatagaattaagaatgggaaaacgcattggttctacaaaggaaaggatgataaaagggaggggcagatcacagctccatctttagatgagtcgcttgccctgtaaaggagagcacttcagtctatttctgtaccataaccgtcccagtttgagccttattttcagtcctg

SEQ ID NO: 93242 - DNA, 600 bp, Chicken  19866894411513_1
acactcacagagagtagtgaggtgctggaacagctgcccagagaggctgtggatgccccgtccatccctggaggtgttcaaggccaggttggatggggccctgggcagcctgggctgggatgaaatgtggaggttggcggccctacatgcagcagggggttggagtttcatgatccttgaggtcccttccaacccaagccattctatgattctacagttcattcaaatgttcacacattaaaaccgcccccacacacataatgattcttttttattatttaaaccaactttacagagctwttctgcaagctgggtctcccaaggaaatgcatacagcttttaatgctatcttgataatacggtcacctatagctatccgatagcctaattcctattttaattttcctttccagtcctgaagaaactgctgaaaatcagcttctacaaatgtcatttgcaagtccattgcctgttatcagatgagccccaacagtcaatttcttcacagctttgaactcagcttcagctcgagatgaattaacgcgatcctatccattctgccaatactcctgatttaataagagataggcctgaagtggg

SEQ ID NO: 93243 - DNA, 600 bp, Chicken  19866894411520_1
ccttcaatagtcataactgcaggtctcattaatgggagtgcttctcagagaacgaatactccaggtacttcacacagatgcgcacgtttctggctcagagctgaaggatgttacaaatgtgaggcatatcattttcaagtttttctccacaaatgagatcaaatacttttccattggattaagtacttgataattgaagcttgcaggggaagcacatttacgaaagtacattaatatgcaaactgctttgcaatgcttgtaacgcacagtaataagaaagaaaaaccccaaaccaaaacraaacaatgaaaagcctggtaccttcttcatttctaagtggtctcatcctggcattcacaggaagaagagaattgttgctgagcagttcagaaggagaagtacaacgctgagattttttgaccgaaagattaataggttcttccagaatattttgcatagaaagacttaattcattcactacatcttgcccagctgtagccaagctgttttctggatgatgatccacagtgttgaagtcttcattttccagcttcaggggaaaaaaaaataacaaaccttattattaattttcttaatgaa

SEQ ID NO: 93244 - DNA, 600 bp, Chicken  19866894411523_1
tctttccttttccctgaaaggggagaaaggggttcccttgccatgcatgaaaccatgcatcagtgtatccaggaactcttggaatgatgctgtgaaggtttctgttgtccccttcacggtgttatgggtctttctttcatatcccatggggtataagctgacattataaactaaaaatagaacagtcacttggatcatctgggctgcaaagtgaagtagaaagcactgtactcaggttggacaaggatctttgtttcagtggtatgcaaagctagatgtttcaagcaagaacaaattatytgtagccaggtaaaattagttgaagtgaaaagcagtacttatagctactatggcctaagagagaatggcatccacatttttgggtcatttacaattccttttaacaatatattgtttaaggacatgtcagtgaaatcagatkgacacaaccataagctacttggatctgggtagaaaaattgttgtgatgtgccgaatgggagcagagctacagcaaatttaaccttcttctccctccacaattttaagtttccacttgaaacagtaatgatagtaccacacctttttgcacagaacttt

SEQ ID NO: 93245 - DNA, 600 bp, Chicken  19866894411523_2
cccatggggtataagctgacattataaactaaaaatagaacagtcacttggatcatctgggctgcaaagtgaagtagaaagcactgtactcaggttggacaaggatctttgtttcagtggtatgcaaagctagatgtttcaagcaagaacaaattatytgtagccaggtaaaattagttgaagtgaaaagcagtacttatagctactatggcctaagagagaatggcatccacatttttgggtcatttacaattccttttaacaatatattgtttaaggacatgtcagtgaaatcagatkgacacaaccataagctacttggatctgggtagaaaaattgttgtgatgtgccgaatgggagcagagctacagcaaatttaaccttcttctccctccacaattttaagtttccacttgaaacagtaatgatagtaccacacctttttgcacagaacttttaagaagttctgtagaatccaaattcacaatgcatagttactgctactacataaaacctctacacaccagctgcatttttagtgcaaattctctgcaatattaaaagaaatctctggaaaacactctgcttcctttttgcct

SEQ ID NO: 93246 - DNA, 599 bp, Chicken  19866894411534_1
  misc_feature (1)..(116): n is any nucleotide
nnnnnnnnnnnnnnnnnnnnnnnnnnnnnnnnnnnnnnnnnnnnnnnnnnnnnnnnnnnnnnnnnnnnnnnnnnnnnnnnnnnnnnnnnnnnnnnnnnnnnnnnnnnnnnnnnnnncaggtgtggcaggctatctccatgtccttggctttgctcctctccttggttgcacagctcagccttcagcagcctgagtgcttggctgtagctacagcagtgtgtgctccaaacccaccctatatccaaatgggttcagccagggcccgctggcaccaaaatcccttcggttttaaacactggygatggtatctgcccaggctcatcccgggagcactgtgctgaggctgtgccctgcatactctttcattgcaatgagaggctccagaggatccagacaacactccaaaccagtaagagtccacgagttcctcaagaacaattttttttgagtgtttccaatgggactccaagcagrtctgctgtctctgactcatttctcagctggaggtattggacctggagctctgtaagacccaggaggagctgrgatgtttgaccaggctctcacggtggctctatttattgggtttttattgcttg

SEQ ID NO: 93247 - DNA, 600 bp, Chicken  19866894411534_2
tcagccttcagcagcctgagtgcttggctgtagctacagcagtgtgtgctccaaacccaccctatatccaaatgggttcagccagggcccgctggcaccaaaatcccttcggttttaaacactggygatggtatctgcccaggctcatcccgggagcactgtgctgaggctgtgccctgcatactctttcattgcaatgagaggctccagaggatccagacaacactccaaaccagtaagagtccacgagttcctcaagaacaattttttttgagtgtttccaatgggactccaagcagrtctgctgtctctgactcatttctcagctggaggtattggacctggagctctgtaagacccaggaggagctgrgatgtttgaccaggctctcacggtggctctatttattgggtttttattgcttgccaggtctttttttgtgtgctagatcactgaactcacttttgaaacagcgctgtggtcctgtgaagttacagattctttggtatccttttctcttccaattaaatccagccggcaatggtgctttgttttcttcctgcatttcacaggtgaaatccacttgaactttagtgatgt

SEQ ID NO: 93248 - DNA, 600 bp, Chicken  19866894411534_3
tgggttcagccagggcccgctggcaccaaaatcccttcggttttaaacactggygatggtatctgcccaggctcatcccgggagcactgtgctgaggctgtgccctgcatactctttcattgcaatgagaggctccagaggatccagacaacactccaaaccagtaagagtccacgagttcctcaagaacaattttttttgagtgtttccaatgggactccaagcagrtctgctgtctctgactcatttctcagctggaggtattggacctggagctctgtaagacccaggaggagctgrgatgtttgaccaggctctcacggtggctctatttattgggtttttattgcttgccaggtctttttttgtgtgctagatcactgaactcacttttgaaacagcgctgtggtcctgtgaagttacagattctttggtatccttttctcttccaattaaatccagccggcaatggtgctttgttttcttcctgcatttcacaggtgaaatccacttgaactttagtgatgtcattatcgtaaacacttcctatccctgccttataaaaaatgacaagatctctttgttaatgaagtggtattt

SEQ ID NO: 93249 - DNA, 600 bp, Chicken  19866894411538_1
atcacaaaactaattcttactcagtctgctgaatcctgcgctgggctgccttaagagaaccacaggaagcttatgtataattccagatgatgaagactaccattctgtttgtcagctctgtggaatgtgaatgttataaataccttgcccatctcctgagtctgattctagcttcagcattcagcccataaatgatgcgataaggcacagtattaccaagagcatgaattaggaatgaccttgttctgtgtgttactccaccggtctctgcatcccggcttgaaacttgttaatgagggragaccggagttacagcacgagtgattatatgaccatatcctctagattttgcctatatatcacttataaaagttccaggcaaaggctgaaaaacattcttgtaatgcctctacatcactgacactctgaggtcagcggccagatggttcactatcatcttttccaaatctcaataactctatgggttctgtagttacattcataatggcaattccttgcttgtgttttctgcatttccattccagctgttcctgtgtatacatatagaaaactcatccctttctgtcatttgcagtgaca

SEQ ID NO: 93250 - DNA, 599 bp, Chicken  19866894411542_1
  misc_feature (1)..(186): n is any nucleotide
nnnnnnnnnnnnnnnnnnnnnnnnnnnnnnnnnnnnnnnnnnnnnnnnnnnnnnnnnnnnnnnnnnnnnnnnnnnnnnnnnnnnnnnnnnnnnnnnnnnnnnnnnnnnnnnnnnnnnnnnnnnnnnnnnnnnnnnnnnnnnnnnnnnnnnnnnnnnnnnnnnnnnnnnnnnnnnnnnnnnnnnnnnttctattctgttactctttcttttgacagtatatttaaagtgtgtggcatagtccttaggccaagctgtgcaaacttggcaaggtcatactgaacaagtatgacagaaaacccmcagtacatgaggcatgaggtccaatggttattccagggttcatagacctgtattattattatttgtttgttggctaggcaacacattgaaactctgtttaattaaatatttggtctctctccagtgaccttggtgaagttacacctttactttaggcagataggcagtgatgccaagggacagcgagagtgtgtgcacaggctggttgtcaggtacctgtaccagcactctgggctgaaagaggatacaaagaactcctgatgctaccctcagcagaccctccaggccacagatgacta

SEQ ID NO: 93251 - DNA, 600 bp, Chicken  19866894411543_1
gcaaatatgcatggatttaaatactaaggtaaagatatgtgtatgtgaactagtgtagactttaacttctgttcatttacttcgcagtattgtaaaattcagattttttttttctcatccaagagaatgtgattagctgtatgtctaaactttgacaacaaactaagagacctgttttgtcatcagaaaccccaagatggcaatacagccttgtttttctttgctgcttatttctgctattattatcataattattttattgcagtacatggaacagatgtgtgattttctcctttactratatcagaagtcattgctgattactgaggattatttgtacaacagtggaaagctcccagtactttgacattaaatgaatgaacgaatgctatgaatgacctgggggtactaaaagattgcatttaataacattaaccaaatagatatctctgctcaagtttggtttccttttacagaagcaagtgacttaacaaccctgttaagaaaaaaatctgtacttacctattatttgtggctcaatgtgtaacataaatttgaatataggtattatatttagaagcagcagcctacattgaacat

SEQ ID NO: 93252 - DNA, 600 bp, Chicken  19866894411548_1
ctcaaaggtcagaatagtcacctgcctgcatggaaacacagaaggtaactccctcattgcatattaagtgattgctaaaataacctcagcagagcacccatccgaccagctgattacagaggaaagataatttcatcaatgacttcatcaaagagcaattactctcttggaaaggaaaagaaagcaacatccccaacaacaagcatcacaattaatggcccaagggaaggatgatggccacagactttgaagttacagattcagttcccggctgagcctcagattggtgtgtgcagctgmtaaattattyaatgcctgcacttcagttatggaaaagaaaaaaaaaagaaataggagaatatggtatttttttttccaataaaaggaaagtgcaggaaggataaacacactggttgaattacaaaccactcgtactattgtggtgagggttacagatagacccaaaggtatgttggccatgactgaaagcacagactctcagtaagggaaaattttagctcttcttcaactaaagtcatcatttcggcttgccaaaatctcccaaccgactcctgctttctcaaggatcacacaccagaa

SEQ ID NO: 93253 - DNA, 600 bp, Chicken  19866894411548_2
agaatagtcacctgcctgcatggaaacacagaaggtaactccctcattgcatattaagtgattgctaaaataacctcagcagagcacccatccgaccagctgattacagaggaaagataatttcatcaatgacttcatcaaagagcaattactctcttggaaaggaaaagaaagcaacatccccaacaacaagcatcacaattaatggcccaagggaaggatgatggccacagactttgaagttacagattcagttcccggctgagcctcagattggtgtgtgcagctgmtaaattattyaatgcctgcacttcagttatggaaaagaaaaaaaaaagaaataggagaatatggtatttttttttccaataaaaggaaagtgcaggaaggataaacacactggttgaattacaaaccactcgtactattgtggtgagggttacagatagacccaaaggtatgttggccatgactgaaagcacagactctcagtaagggaaaattttagctcttcttcaactaaagtcatcatttcggcttgccaaaatctcccaaccgactcctgctttctcaaggatcacacaccagaacataaagcta

SEQ ID NO: 93254 - DNA, 600 bp, Chicken  19866894411558_1
agaaattaatcactacatactcagctatttttttttaatgccaagaaaacatattttattgtatttaatcattacactgtcaaagctgttggtgctaaccatgtataatcaagttgtcaatatgtatcgtgtgaaatattgagcatgagttcttcaaatcaacctgtgtggattttgccccactaaatatcaccattagtcttatgctttctttttacagactcccgtatcagtaagttagaggcgtggatgatcagatctttaaattgtatgatcacattcctataaaaggtagacagwttagattaattccactgcaaggtttggtcggaagtcttgattaacttttattaatttttatttttctgctattttcattcagattattgataacaatgagtcatgaaatctgttccgccccccccacctttcctgagcatctgctatttcaagtaaaagtgaattcaccacataatctctcagcagtaaagcagttaactcttacgacccaaaagatactgattcaagcagacaaacctcctatgtctgcactgatctgcccctaggcagcatgaagcatttaaactaaattgaccaaaa

SEQ ID NO: 93255 - DNA, 409 bp, Chicken  19866894411561_1
gacataccttatcattaaaggtttgatatttattggcattttgtaggccttccttaataaaaatattatagcaagttgcagtaagttaaattgggaaaattttgctgaataggaagagggaaaatatatcttcaaacttttcaggtatttaaatatgaattcgtaaatggttaggagagcaatagctattaacatatgctgccttccactgggcaatttcaataccagcacaattctatttgtttatctagagctgctgggggatgattcttacaaaaacacgcagcagaaaagaataaracaggaattgcattaagcaagaaactgtatctctttttcagacaccgagaatgttgaacagctatatgaatgtccaatatgtggtcttacctgtacagacattcggatt

SEQ ID NO: 93256 - DNA, 600 bp, Chicken  19866894411564_1
actttgaatccatttttattaattctagaacctataacaataaatagaaatattaatttgcttccaggttttgtttcttcctcactctgtcagaacatccctgtgaagggcatcatgttagcttgaaaagcaattgaacggacaaaggaaagtgtaatttccaagatctgataaaagtaatttctgcatcactgtgttgtactgggacgtcctctttctacttgatgaggataattttgacatccagtcatcatagcaatcagtgaaatacaaaatatctagacagataattcctttgtkatggaaggactgtgaaaaaaaaaaaaaaacccttttcattttgtagactgaagcagaagacaatacaagttgatctaaagaaacttctagttctgatattctgccctaagctccattctaaatagaagcattattactgagaagtcatatacatattctttcttgtttttttttcatgaacattttctcttcagatcctttacacaggaatagtggtttatgctccatcactggctctcaaccaaggtgagtttccctgcctatatggctactccaaataacaacaccacaagactcaag

SEQ ID NO: 93257 - DNA, 600 bp, Chicken  19866894411568_1
tgaagaatgaagttgggtgacggtactaagaaagcaggtgttggtgttcttggacagggctggctcgcagttcttcctcctgaatagttttagatccaagtttgattttcagaccctgagtgggtttcttttctcaggactcttctgccttggccttggccttcaacgtaatgcagagcagtctcacaagctttattattcagtggatgtgatgagagcatcacagtcttaccttctggcttcagaaattgtgaaatagcagggaaaaaaaaggcaggcattaaaggctgcactaagatraaatggaattaaactagggaaaaacagaaggaggaaaggatgtaattttccatttttgaaagacgtgtttaaaaaaggaaggatttacccctctgctctctgagctattttaaagttctagctttaaaaatgtttttacatagtgaaaataattgcttccagtccttctacctggaattctgaagacaggaagcagtgttaaagatgagaataattggagggtcttcatttatttcttctcagtggaccatttctatcttatttgtactgcaaagacacactcctgtgtatgtgcataat

SEQ ID NO: 93258 - DNA, 600 bp, Chicken  19866894411572_1
tccggtctagatgctagcacagacaggactttaaggcatgtcatgtgaagcactcttctcagcagagacagagcttaaatgtctcagctttcaccagagctgcaggcactacaaagggtgccattcagtatgagtaagagctcttttcttaagtgaattcgtttaagaaataattaatattcaaatgaaatttcctccaaactttcatttctgccaacaaaggaagttgtcatggtgaggtattactgtgagtaactccaaatggataccaataggtaatgagatcatcaaaacttcacrtctctatgctccaggtgatgtaattgtatccagtagtttggattcttgacaattgccttcttttatttcttgttggaagaggcttaaaagcattggtagactccagactgtaatctctatcacttgggagtttatattttcartacataacaacgctttgttcttacaacagagaatcagagatctataccttctttgatagatgctgatgttttcaaaatcttcaagtaaaatccaaacctggtttgccgtaagcagactgtattggttttggttgagatatgcccttttgtattaatg

SEQ ID NO: 93259 - DNA, 552 bp, Chicken  19866894411572_2
ttttcttaagtgaattcgtttaagaaataattaatattcaaatgaaatttcctccaaactttcatttctgccaacaaaggaagttgtcatggtgaggtattactgtgagtaactccaaatggataccaataggtaatgagatcatcaaaacttcacrtctctatgctccaggtgatgtaattgtatccagtagtttggattcttgacaattgccttcttttatttcttgttggaagaggcttaaaagcattggtagactccagactgtaatctctatcacttgggagtttatattttcartacataacaacgctttgttcttacaacagagaatcagagatctataccttctttgatagatgctgatgttttcaaaatcttcaagtaaaatccaaacctggtttgccgtaagcagactgtattggttttggttgagatatgcccttttgtattaatgcagaatgaagattcctttactgtgtgactgcagttcatcatctcatgtcaggtaggatgcatgtgagtaaatcccagagctggaaagcctggaag

SEQ ID NO: 93260 - DNA, 524 bp, Chicken  19866894411573_1
tgtgcagcagtgttcatcagtgttacactgactgttaatctcctggttggttgtgtgaagtttccctgtttcgtgttagtggaaagcaatcagcacacagcagttgaaggtctggcctcatctggcctcatcatcttctgatttcccttcatttatacagattggctcttagtgtaagtgctagtttactttgtatgtatatgtgtgtacttacatagttatctttctgtaaagatgcacaatatcactgctgttttgggctgaatcaagtagacatcctgtttgtctaagaaacaaatktrgatgagcttagagakgagtgaaatgttgagaagaaattagagcattcagaattagcactgtagcatttgtgcattacttagcacgtgcaggttgcttagctttcctcccttattccacaaaaattccaattttccatgaagaaacaagacccattatcagtcaacagtactttcatgctagaaacgaatgcattgttatctaagggttgaacttgcttgaaa

SEQ ID NO: 93261 - DNA, 522 bp, Chicken  19866894411573_2
tgcagcagtgttcatcagtgttacactgactgttaatctcctggttggttgtgtgaagtttccctgtttcgtgttagtggaaagcaatcagcacacagcagttgaaggtctggcctcatctggcctcatcatcttctgatttcccttcatttatacagattggctcttagtgtaagtgctagtttactttgtatgtatatgtgtgtacttacatagttatctttctgtaaagatgcacaatatcactgctgttttgggctgaatcaagtagacatcctgtttgtctaagaaacaaatktrgatgagcttagagakgagtgaaatgttgagaagaaattagagcattcagaattagcactgtagcatttgtgcattacttagcacgtgcaggttgcttagctttcctcccttattccacaaaaattccaattttccatgaagaaacaagacccattatcagtcaacagtactttcatgctagaaacgaatgcattgttatctaagggttgaacttgcttgaaa

SEQ ID NO: 93262 - DNA, 507 bp, Chicken  19866894411573_3
cagtgttacactgactgttaatctcctggttggttgtgtgaagtttccctgtttcgtgttagtggaaagcaatcagcacacagcagttgaaggtctggcctcatctggcctcatcatcttctgatttcccttcatttatacagattggctcttagtgtaagtgctagtttactttgtatgtatatgtgtgtacttacatagttatctttctgtaaagatgcacaatatcactgctgttttgggctgaatcaagtagacatcctgtttgtctaagaaacaaatktrgatgagcttagagakgagtgaaatgttgagaagaaattagagcattcagaattagcactgtagcatttgtgcattacttagcacgtgcaggttgcttagctttcctcccttattccacaaaaattccaattttccatgaagaaacaagacccattatcagtcaacagtactttcatgctagaaacgaatgcattgttatctaagggttgaacttgcttgaaa

SEQ ID NO: 93263 - DNA, 567 bp, Chicken  19866894411577_1
tagaggctcacttcctcaaagtcccacttattttgtaaggttggagtaacgcattccttcaaaataatacttggtggtaactattaccgagaaatatcatgcaagagtggtaattattcctcacacattttcacagcaagaaaatctggtaagtgatctgttggcctgatatgattagatgacttgttttagttgaccaaacgactagttccacatttaatgtctttaaccatgcttagatagtatgggccagattccacagacaagtaaaaaaaacatcactaaattacaatgtcttartatgctgtggatagcctttatttcttccaacaattcagaactacgctctgctttatgcaaataggcttcatcaagtctgcatgccaggagttctcttggaaactagttcaagcatagatctgctgagataagcttcaaatcttgctaggcctgtttatttcaactgctttttatgtaagataagccatgtgcaaatcaaaaactgtatggggagggaatagatttgatctgaataccagtgtgttatgtttacaacaatttttctat

SEQ ID NO: 93264 - DNA, 600 bp, Chicken  19866894411588_1
tttctgttcagacgtgggttcagggctttgtttttcctgtagcaccgagcacgttacaaacacagagccttgaagcagcgcagagaattcagctctctgccttgctccaaacgttggggacatcaaaataacacacaggaaaagaagaaaaaaaaccagatcctcttgaagcagaggcaaaaaaatggacagaaagagagagagatgatggtccactgcagaaatagaaatgcaaatttcagaaaatcacaggaaaatagatcagaaaagcaaaggaaagccgcactgtctgctttctgstcggagggagctctgcctgagcagcacacaggctgatggccagattagacagccacttcctagcactttacaggctcaataacacgttcggttttttgctgcatgttttttaacagcagggacggrgaccgctagagctagccacagccacaggcccggccgagggaacagctggcgcaccacacagccgagccggtcctctccccccgtcctccctcctcacgcctctcccgccgccccgttccccgccggctccgtgagctccgccgacccgcgggaggcagcggcaggcggcgcacc

SEQ ID NO: 93265 - DNA, 600 bp, Chicken  19866894411588_2
aataacacacaggaaaagaagaaaaaaaaccagatcctcttgaagcagaggcaaaaaaatggacagaaagagagagagatgatggtccactgcagaaatagaaatgcaaatttcagaaaatcacaggaaaatagatcagaaaagcaaaggaaagccgcactgtctgctttctgstcggagggagctctgcctgagcagcacacaggctgatggccagattagacagccacttcctagcactttacaggctcaataacacgttcggttttttgctgcatgttttttaacagcagggacggrgaccgctagagctagccacagccacaggcccggccgagggaacagctggcgcaccacacagccgagccggtcctctccccccgtcctccctcctcacgcctctcccgccgccccgttccccgccggctccgtgagctccgccgacccgcgggaggcagcggcaggcggcgcaccatcaccttccttgccgctcatctcgctgccgccgccgagccaggcgtccccacggcgagccgcttccccccctcacgccgccagggccccacggcacggcgctgaggtgccctccagcctgcctgc

SEQ ID NO: 93266 - DNA, 600 bp, Chicken  19866894411593_1
ccctgtttctgtggaaactgtgtgttggagtggaataggaataatggtggagaaaaggagagcagtagcgttttggctgaagtcctgttggccagcccccgtttcagctgggataagtcagccaagcaaggcctcagtgctggagccccgacagttctttttcctcctcctcctaacttgtgccgagggaggagtctgcttcacagacaccattcaaaaagtgcttgctaaagcaatttatctgtattttcccctggtttttcatgcaacaagaattttagccagtcagtaatgttagtyaatagctgcctacactggtagggtaaggtttgttctgaaaagaacttccattgacgcgtatgttrctcagycactgctcttctaaaaagcaccactgtattcttggaaagaaactctcccaaaactgaaaagacacatttttcatcattcaggggtttccaaaatatgcatatgtttgatggattgccaggaaagacagacagccttgaccagtaaactcagctctgtattctctcttctctggtagctgtttcactgacattcatgttgttttctcctggaataaggtatctttcttaa

SEQ ID NO: 93267 - DNA, 600 bp, Chicken  19866894411593_2
tagcgttttggctgaagtcctgttggccagcccccgtttcagctgggataagtcagccaagcaaggcctcagtgctggagccccgacagttctttttcctcctcctcctaacttgtgccgagggaggagtctgcttcacagacaccattcaaaaagtgcttgctaaagcaatttatctgtattttcccctggtttttcatgcaacaagaattttagccagtcagtaatgttagtyaatagctgcctacactggtagggtaaggtttgttctgaaaagaacttccattgacgcgtatgttrctcagycactgctcttctaaaaagcaccactgtattcttggaaagaaactctcccaaaactgaaaagacacatttttcatcattcaggggtttccaaaatatgcatatgtttgatggattgccaggaaagacagacagccttgaccagtaaactcagctctgtattctctcttctctggtagctgtttcactgacattcatgttgttttctcctggaataaggtatctttcttaaaaataaaatatgaattaacagaaaaatatattttattgttttttctggtgttatgatttctgtta

SEQ ID NO: 93268 - DNA, 600 bp, Chicken  19866894411593_3
tttggctgaagtcctgttggccagcccccgtttcagctgggataagtcagccaagcaaggcctcagtgctggagccccgacagttctttttcctcctcctcctaacttgtgccgagggaggagtctgcttcacagacaccattcaaaaagtgcttgctaaagcaatttatctgtattttcccctggtttttcatgcaacaagaattttagccagtcagtaatgttagtyaatagctgcctacactggtagggtaaggtttgttctgaaaagaacttccattgacgcgtatgttrctcagycactgctcttctaaaaagcaccactgtattcttggaaagaaactctcccaaaactgaaaagacacatttttcatcattcaggggtttccaaaatatgcatatgtttgatggattgccaggaaagacagacagccttgaccagtaaactcagctctgtattctctcttctctggtagctgtttcactgacattcatgttgttttctcctggaataaggtatctttcttaaaaataaaatatgaattaacagaaaaatatattttattgttttttctggtgttatgatttctgttaatcagt

SEQ ID NO: 93269 - DNA, 600 bp, Chicken  19866894411594_1
aagggcagctcaggggcttccctgtccaagccaacatctccagcagctcagggttgtgctgagcctcctccccagccagctgcacccagcacagggtgcgggagaatcggggctgtcaagggttgcacaaacagccgtagtgggatgggatggtacgcctcaccgagaaggactcaaccttcacaccaacagcctgatgcttcttgccaaggttgcagagatattcttccaggcaaggcaagtcctccaggtggctgacggccgcatcaatcaccagcatcacctgggggagcacagcarctgcaccacattagtacaaggccggcccctctgctccaccctgctcagcccagcagccaccaccaccacctcccagcacaggagaggagctgctgcaaggagtgctgctggcctcccttcctggaggagaaagtagaacctctggaagttgccaggatggtgcaacagtgtagaaggcagttctaaggtaggccaaagcattttggggagggggagatagcccagccagraracctggtctggcgacgcacaaatgacagtgggctcccagagggatggagaatcacrtagaagcgggac

SEQ ID NO: 93270 - DNA, 600 bp, Chicken  19866894411594_2
aggcaaggcaagtcctccaggtggctgacggccgcatcaatcaccagcatcacctgggggagcacagcarctgcaccacattagtacaaggccggcccctctgctccaccctgctcagcccagcagccaccaccaccacctcccagcacaggagaggagctgctgcaaggagtgctgctggcctcccttcctggaggagaaagtagaacctctggaagttgccaggatggtgcaacagtgtagaaggcagttctaaggtaggccaaagcattttggggagggggagatagcccagccagraracctggtctggcgacgcacaaatgacagtgggctcccagagggatggagaatcacrtagaagcgggacagagtcaatgagggatgaagggagcagacagagcaagttaggagagattaaagcctgggcacagttagcccggcaaaggcgagaggtgatagaactgtactctataatttcaagagggaaattatctccaagtagagcaaagagctgtttcagcttaaggcagtgagagcagaaataaagatggacatcgctgtccaataagcagcggcagggaaatagcagaaagcctg

SEQ ID NO: 93271 - DNA, 600 bp, Chicken  19866894411594_3
gcaaggcaagtcctccaggtggctgacggccgcatcaatcaccagcatcacctgggggagcacagcarctgcaccacattagtacaaggccggcccctctgctccaccctgctcagcccagcagccaccaccaccacctcccagcacaggagaggagctgctgcaaggagtgctgctggcctcccttcctggaggagaaagtagaacctctggaagttgccaggatggtgcaacagtgtagaaggcagttctaaggtaggccaaagcattttggggagggggagatagcccagccagraracctggtctggcgacgcacaaatgacagtgggctcccagagggatggagaatcacrtagaagcgggacagagtcaatgagggatgaagggagcagacagagcaagttaggagagattaaagcctgggcacagttagcccggcaaaggcgagaggtgatagaactgtactctataatttcaagagggaaattatctccaagtagagcaaagagctgtttcagcttaaggcagtgagagcagaaataaagatggacatcgctgtccaataagcagcggcagggaaatagcagaaagcctgca

SEQ ID NO: 93272 - DNA, 563 bp, Chicken  19866894411594_4
ggagcacagcarctgcaccacattagtacaaggccggcccctctgctccaccctgctcagcccagcagccaccaccaccacctcccagcacaggagaggagctgctgcaaggagtgctgctggcctcccttcctggaggagaaagtagaacctctggaagttgccaggatggtgcaacagtgtagaaggcagttctaaggtaggccaaagcattttggggagggggagatagcccagccagraracctggtctggcgacgcacaaatgacagtgggctcccagagggatggagaatcacrtagaagcgggacagagtcaatgagggatgaagggagcagacagagcaagttaggagagattaaagcctgggcacagttagcccggcaaaggcgagaggtgatagaactgtactctataatttcaagagggaaattatctccaagtagagcaaagagctgtttcagcttaaggcagtgagagcagaaataaagatggacatcgctgtccaataagcagcggcagggaaatagcagaaagcctgcagcgatcagaggagaagagc

SEQ ID NO: 93273 - DNA, 600 bp, Chicken  19866894411597_1
gaaaggaagagtggtgactgtgtgcctatgaatgtagacagtgctgggtaacaccacaaggactcacacacagttatcagtggcaagagatgccctacataaagcatcttggttgctgtcaaccagaacaaaatacgacacgaacacatgtcctcctttaaccactctgaacaccgctgccaggcaatggctctttgttaaagcatttatccactgtagtagcaaacggaccgtgctattcacagctactgctgccctgtaatcgtgtcttacacagttttcttctgcaagttatgatcrtacacttcttacagcatattttgctatttctcagccatataaatctacacattttctagttttcttttctttttttcccttttcctttcttttcttttttaaggtcatcttgcacaagggaaatcagagagatgctgatggataaacattatgttctgtaaatgaagtccagctgccagaaagttgagctatcttctaagagtggaaggattaaaaagcaattaggggcaaccatttaccaagggcataatagtggaaagagctgatatgtgcctatcagcccctctgggcctcattgca

SEQ ID NO: 93274 - DNA, 600 bp, Chicken  19866894411599_1
agctgttaacatcatagaaccattagggatggaaaagatcaccatgatcaccaggtccagtgccagcccatcaccaccatgcccactaaccacgtccctaagcactgcctctgaaccacccgttgagtcccctttgtttccttcagttttggtgggttcgagggcccatgtgcccacgaggactgtagtacaggtgttgtggggcagtgaggctgtgccaggcctaacgaaaaggaacagcttataaattgctgtttgccatttttcactttgatctcatatttaaatgttttgagatcyggagtccactcagtagtggtgttgcctggttgaggtgttgcctagttaccatttttgatatcatggagaaagaataaataaaatgacatcttaatattaagtgctgtggctgcagaagtgctgcctgtgcaccagactgccaagcctgaaatcctcttttgaacaagctcgcattcttactgggagactttgaacttcatccccctaattttattttatttttcaatagatatatagatgttacagcattgcacggcattgttctgcagtggggaatccaagactgggcgtttggtcagc

SEQ ID NO: 93275 - DNA, 600 bp, Chicken  19866894411612_1
tgcatcattaccagtgatgacatgtggtgtcacccctaagagctggagtcaaaacagtagtccatgaagtgccagcacgtgaattcccatcaagaaaaaaagtacaagagtcaacctcagcaggtaaactgaaggcttatgtcccttctccaattgctttgtcaatgtcctcttccctagatagggatcctagctatctagttttactgcctgctcagtgcaggctattgactccattatcctagcatcagcacagtcacatgataaaatgctcaccctgctggcaatatcacatctcascactcactgactgatgcctagcaactcccaggcagtggccaaataaccctgcccaactccctgcagctttataaccttctgcctgatgccttgtattatggaataaccccttgactaatgaaggccagctgtcctgcttccacccttgtcacatcatggcaaggtgtgaagtggcaaggtggcaagtggcagcagctccccactaagtgatctagccctgctctagctcagcctggaaatagttctgctactcaacaacaacaaaagcattggtgtgttgtgggcattgtcttggcagaa

SEQ ID NO: 93276 - DNA, 600 bp, Chicken  19866894411618_1
tttggtgtggtaaagaggtggtcttgtgttcgttagtcctttctaccaggagctatgccactgctaacgtgcaggtgtaagaaggcattgccatctgtaggtgcacatgccaaaagctggctttaggtcgtaacaaaaatgactgaaaatgaggtggctgtgatgtggaaaagccacaggaacgaacagctcagacagtatatgaccttctgggtagaaaaaaatggcaaagttcacaaaatgggtcactgaaacctccgagtattgtataaaagccaaatattttcagaggggatgagraaggaggatcacctacatcagaaaacccttaagaaagcctccagtgcagaggaaacatttcctctttcagcattccttctgggtgccaaattttccttctgttcctccccacctattaaacaaagctgcaacttccaattcctatcagttttcctaaatatgtgcagcttatgtggcttctccgagccgcgaggcttcacgttctcctgccagctccttgacaatgtggctccaacagcatcctccacttttggctgcctctgggacccctggtctcttctggaaagggagagggaaagc

SEQ ID NO: 93277 - DNA, 600 bp, Chicken  19866894411621_1
attacaccgtagctgtgatgagaacatagcacgactacactgctgttcagtttgaggtactttccatgcccattttctgcatagctgacagttcatcgatgtgatgtaattattgttttttcctctgttactttcgcgcttaataagcagttttgggcacagaagtggtaaaacagcattttagcctgaaatataattatacagaaaaaacttgacaattgcagcataactgaaatgctattaccctctacaagaagtaatcgtacaacgcagtgtagaactacatgtgttactggtaaygtttgaagggatttggtgctacgtggacctggcaggaatggaataaaggagagttaaagatatctgcagctttcccttccattgacatgtcagggctgtggaagggtgcaccctccaaagctgcaactcactggatagaattggataatgaaaaccaggaatagactcattctgcccccagtgctcttcattgcagttcatgcacttgcccaagggaggctgtggatgccccatccctgcaggcattcaaggccaggctggatgtggctctgggcagcctggtctgctggttggtgaccc

SEQ ID NO: 93278 - DNA, 600 bp, Chicken  19866894411638_1
attttgagttcaactgcaaaagagtttgaacagctattccagcttttgttaagggaatgcaggtaatctcagaagaaaagcggatatttccttgtcaaaccaatcataatagattagattagagaattgcaactggcccataatttcaagcatgagttttttcttcatctctcaggaatgagagtagagtcatgtaaaaaagtggaggaaaaaaatactttcattttttctgaacctgaaaagtttggaagattccagaaagtgtagttaatccacacatgcttaactatgaagtacttygataggctaaaaaatgtccttcattagatacttttttatcttttcatgacactacaaaactgtgcgttttcatgacgcactgaatgttagcctgggatmccctaaacctgtgcatcaccgtcacctataattccacacagtcagatatgtggacatacacagccatatttttatttttctagtggaatttagagtttacattaaccacaatggaagagaagatattcttcctttattccttttctgactgtgactttgggagtggttgacttaagatagatgaaaaatgaattgagtttg

SEQ ID NO: 93279 - DNA, 600 bp, Chicken  19866894411638_2
ccaatcataatagattagattagagaattgcaactggcccataatttcaagcatgagttttttcttcatctctcaggaatgagagtagagtcatgtaaaaaagtggaggaaaaaaatactttcattttttctgaacctgaaaagtttggaagattccagaaagtgtagttaatccacacatgcttaactatgaagtacttygataggctaaaaaatgtccttcattagatacttttttatcttttcatgacactacaaaactgtgcgttttcatgacgcactgaatgttagcctgggatmccctaaacctgtgcatcaccgtcacctataattccacacagtcagatatgtggacatacacagccatatttttatttttctagtggaatttagagtttacattaaccacaatggaagagaagatattcttcctttattccttttctgactgtgactttgggagtggttgacttaagatagatgaaaaatgaattgagtttgcgcaacttcttgttagtaagtgaaaatgcactggcctttaaattgacctagagcattggcaacaaatggaaatacagttgtttgtttggtaggcaagga

SEQ ID NO: 93280 - DNA, 600 bp, Chicken  19866894411640_1
tcagtttctggttgcatatgtttcgtttaacagggttttacgttcatagaatcttagaatgatctgggttggaagcagccctaaaacccatccttttccaacccctgctgtgggcgctgggtgcccccgatcaggtcagactgcccagggccccagtgtggggccagtgctctccccagagagcctaggatatattataggtcagtatatttgttcatatgttcttctgggcttggggagaagctttattaatgccacgatcttctgctgtttttaacttgtgtgtgttttttccttttygtttttaggttatttaatcagccactattttgaataagaaggaaaaacaatgatgtcaaggcaggcctttctctgcagtttgggatctctgtatttgtcccttctgtttgtatttcttctgatggatgtttatgcaaggcctgcaaataattcagccctcaaagagaagccagctgacagtagggatgagaacgagatcttgcctccagatcacttgaatggggtcaaaatggagatggatggacatctcaacaaagaatttcatcaagaagtttttctgggaaaagagatggaagagtt

SEQ ID NO: 93281 - DNA, 600 bp, Chicken  19866894411647_1
ctcactgtgtctgacccacaggccctcaagtgggtgtgcacacacgtgtgttagcaaagcttctcctctgactgttgcaggtacagtgctgtgtgcttctgcatgggtcctcatgtcagattgctttgggtgcacagaaagctggctgttgtgggagccacagtctctacatggctgtggaggatgaagggagggaagatgttggcatttgccttgccatgcaaatggtggccgaggtcactgtggacttgggagcagttttatagcacacattggaaagtccttaagccaccagtcccmcatttagttattagcagcaagcacagaggttgagccacctggcagggtgagggcaggtgctttcctatattgctctgtagagatgatgtgttgattcatcccttcctagagtacattaatcctcattactgaacacacagcactgtatgagtgcattatctatatcatttacatagttgcctattgactaatcgtgrtgctgctctcagtatgaaatccttttgcttgaacaattaataaagctctaaatcctattagaaatgtaagatatcatagctgacctaaacagygataaacttt

SEQ ID NO: 93282 - DNA, 600 bp, Chicken  19866894411647_2
gatgttggcatttgccttgccatgcaaatggtggccgaggtcactgtggacttgggagcagttttatagcacacattggaaagtccttaagccaccagtcccmcatttagttattagcagcaagcacagaggttgagccacctggcagggtgagggcaggtgctttcctatattgctctgtagagatgatgtgttgattcatcccttcctagagtacattaatcctcattactgaacacacagcactgtatgagtgcattatctatatcatttacatagttgcctattgactaatcgtgrtgctgctctcagtatgaaatccttttgcttgaacaattaataaagctctaaatcctattagaaatgtaagatatcatagctgacctaaacagygataaactttcctgtgattcccataacttgcgcattccttccccatggttcagcaaagctgtttatactgcaaagtcctacccaccacactttgactttgaagcttccagagaagtaagagtcatcagaacagagaggaacgttttgtatttttcactgacttcatggtttacaggctgttggaaatgtgaggctctgtttgtagta

SEQ ID NO: 93283 - DNA, 600 bp, Chicken  19866894411647_3
accagtcccmcatttagttattagcagcaagcacagaggttgagccacctggcagggtgagggcaggtgctttcctatattgctctgtagagatgatgtgttgattcatcccttcctagagtacattaatcctcattactgaacacacagcactgtatgagtgcattatctatatcatttacatagttgcctattgactaatcgtgrtgctgctctcagtatgaaatccttttgcttgaacaattaataaagctctaaatcctattagaaatgtaagatatcatagctgacctaaacagygataaactttcctgtgattcccataacttgcgcattccttccccatggttcagcaaagctgtttatactgcaaagtcctacccaccacactttgactttgaagcttccagagaagtaagagtcatcagaacagagaggaacgttttgtatttttcactgacttcatggtttacaggctgttggaaatgtgaggctctgtttgtagtaatgtacttgcaactctccatgtgtattaatcatagcttagagttcacatactacaggattaattgactctgctcactcaggagcatatatcag

SEQ ID NO: 93284 - DNA, 599 bp, Chicken  19866894411652_1
  misc_feature (1)..(137): n is any nucleotide
nnnnnnnnnnnnnnnnnnnnnnnnnnnnnnnnnnnnnnnnnnnnnnnnnnnnnnnnnnnnnnnnnnnnnnnnnnnnnnnnnnnnnnnnnnnnnnnnnnnnnnnnnnnnnnnnnnnnnnnnnnnnnnnnnnnnnnnnngagatagggtgctcttctgacttgagcaagccatggcacagcacaaaacccagccaactgcctgtgtttcttcttctcaaaatgtgatttagagaccaatttcaaggcagcattatatgcttcagtaaagggttctcaaaagctttgaataagaaaaataccrgcaaacacacagctctgcactgttgcaggcactttgctgaatactaagtattgagaaaatacagcaatagaagttgtgtcttttccagcaggtattccttggggaaaatctctcactgctcttcacctgtttctgactgtaacagaagagtcaggtgcacagaccggtcacactgctgctgcttccaaacagtattccagacattataaaaagatgctgggtctgaaattttataacaagtctcatcagttggctgttttattttcctggaaaggagctcaactgaacaagctctggca

SEQ ID NO: 93285 - DNA, 600 bp, Chicken  19866894411656_1
cgattcctgcttttccaacttgagctccccttcttctggctcctccggctgggcaaggctcctgcatggacacccgcatcactcagcctggggatggagtgagacacctcagggctatggatgtaaccccaggaggagatgctgggatgtggcatctctctgctgggaagggaaaaatggagcgagaaggtgtttggggatcctcagctccaggaggaaggaggcagaggggatccagcccgtctggctgagcaggacacagacatgaagccacttgtggcagctgccctgtagggaacygcagtccccatctctgccgtggccatgatcgggagcacagctgcattttcatcaatggaagcatcaggcacacatcctcagcaataaggaaacccggcccgccccacagccacccgttatctcacatcccagttccgtcctgcacccttcctgtcccagatgtgcgtcagcacagctcctctgccacctccggccatgccaacgccacaccagccccttcccttctcccatcccctccagcaaacccagggccacgggactgcagctcaatgctttgtgtcacccttttaaaaccggacg

SEQ ID NO: 93286 - DNA, 600 bp, Chicken  19866894411671_1
gattaaagaccttttcaatagcataaagctaaaactatttatattacctactttaaaggaagagaatgcaacttacactcaagaacagtgagaaatggctaagggcagcagataaaaacaaatcaatctgattcaactatgaaaaatcatcacaagtggacagaataaggttttctgaacacaaaaaccacctccaccaccaacaaaagaagtgaaacatggttgtgtacacatttgtcgcaaaagtctacactggacctactctctgagtaggagggcaagcaatgatcagttcgcagytctgaatactgwctcccagcagtgtgctgcctgtttggtcagccactactgcttccaggagtagttggagaagctgaggtacattatcttcagcagttgtacttacctctcctttgaagaatcctaagctctcaaaacaacaaatttaatacatctttcagtcccattattaaagtcccactgttaaatttaacttaagttggccaataacagcatagaagagggatgctactaatgataaaggctacatttccattagtcaacaaagaacaattcaatcgaagtcagacaactcaactg

SEQ ID NO: 93287 - DNA, 600 bp, Chicken  19866894411671_2
tttcaatagcataaagctaaaactatttatattacctactttaaaggaagagaatgcaacttacactcaagaacagtgagaaatggctaagggcagcagataaaaacaaatcaatctgattcaactatgaaaaatcatcacaagtggacagaataaggttttctgaacacaaaaaccacctccaccaccaacaaaagaagtgaaacatggttgtgtacacatttgtcgcaaaagtctacactggacctactctctgagtaggagggcaagcaatgatcagttcgcagytctgaatactgwctcccagcagtgtgctgcctgtttggtcagccactactgcttccaggagtagttggagaagctgaggtacattatcttcagcagttgtacttacctctcctttgaagaatcctaagctctcaaaacaacaaatttaatacatctttcagtcccattattaaagtcccactgttaaatttaacttaagttggccaataacagcatagaagagggatgctactaatgataaaggctacatttccattagtcaacaaagaacaattcaatcgaagtcagacaactcaactggagaaagccttc

SEQ ID NO: 93288 - DNA, 600 bp, Chicken  19866894411671_3
tgaggtacattatcttcagcagttgtacttacctctcctttgaagaatcctaagctctcaaaacaacaaatttaatacatctttcagtcccattattaaagtcccactgttaaatttaacttaagttggccaataacagcatagaagagggatgctactaatgataaaggctacatttccattagtcaacaaagaacaattcaatcgaagtcagacaactcaactggagaaagccttccagttttgagattacagaagtttgtttgacaacagaagaatctgagcaaaacacgttttccwactatttggaaacagcaagcatcagagaacacctaaagatagtcaaaacagaaggcaatgaaagctggacagctaatatagactaaagaattacawsatgtaacaacctttwcctcacacagcacatttcacaacatgaacaacttcagtgcttctaaaggtgatttatttcaacctagtaagcatcagttactctttcctactgctcaaaaacattaatttcatgtgagcattagaataaggacagatcctggataaatacgtctttccagacagggatattttggatatagcaactcc

SEQ ID NO: 93289 - DNA, 600 bp, Chicken  19866894411671_4
taaagtcccactgttaaatttaacttaagttggccaataacagcatagaagagggatgctactaatgataaaggctacatttccattagtcaacaaagaacaattcaatcgaagtcagacaactcaactggagaaagccttccagttttgagattacagaagtttgtttgacaacagaagaatctgagcaaaacacgttttccwactatttggaaacagcaagcatcagagaacacctaaagatagtcaaaacagaaggcaatgaaagctggacagctaatatagactaaagaattacawsatgtaacaacctttwcctcacacagcacatttcacaacatgaacaacttcagtgcttctaaaggtgatttatttcaacctagtaagcatcagttactctttcctactgctcaaaaacattaatttcatgtgagcattagaataaggacagatcctggataaatacgtctttccagacagggatattttggatatagcaactcctttgtgacttccctgcagttaactgcctaaagcagtacatacaaatgaaagatggtaatgccttttatatcattccccaacctatcccatgccata

SEQ ID NO: 93290 - DNA, 600 bp, Chicken  19866894411671_5
aaagtcccactgttaaatttaacttaagttggccaataacagcatagaagagggatgctactaatgataaaggctacatttccattagtcaacaaagaacaattcaatcgaagtcagacaactcaactggagaaagccttccagttttgagattacagaagtttgtttgacaacagaagaatctgagcaaaacacgttttccwactatttggaaacagcaagcatcagagaacacctaaagatagtcaaaacagaaggcaatgaaagctggacagctaatatagactaaagaattacawsatgtaacaacctttwcctcacacagcacatttcacaacatgaacaacttcagtgcttctaaaggtgatttatttcaacctagtaagcatcagttactctttcctactgctcaaaaacattaatttcatgtgagcattagaataaggacagatcctggataaatacgtctttccagacagggatattttggatatagcaactcctttgtgacttccctgcagttaactgcctaaagcagtacatacaaatgaaagatggtaatgccttttatatcattccccaacctatcccatgccatac

SEQ ID NO: 93291 - DNA, 600 bp, Chicken  19866894411671_6
aatttaacttaagttggccaataacagcatagaagagggatgctactaatgataaaggctacatttccattagtcaacaaagaacaattcaatcgaagtcagacaactcaactggagaaagccttccagttttgagattacagaagtttgtttgacaacagaagaatctgagcaaaacacgttttccwactatttggaaacagcaagcatcagagaacacctaaagatagtcaaaacagaaggcaatgaaagctggacagctaatatagactaaagaattacawsatgtaacaacctttwcctcacacagcacatttcacaacatgaacaacttcagtgcttctaaaggtgatttatttcaacctagtaagcatcagttactctttcctactgctcaaaaacattaatttcatgtgagcattagaataaggacagatcctggataaatacgtctttccagacagggatattttggatatagcaactcctttgtgacttccctgcagttaactgcctaaagcagtacatacaaatgaaagatggtaatgccttttatatcattccccaacctatcccatgccatacattatcagaagccag

SEQ ID NO: 93292 - DNA, 600 bp, Chicken  19866894411671_7
tctaaaggtgatttatttcaacctagtaagcatcagttactctttcctactgctcaaaaacattaatttcatgtgagcattagaataaggacagatcctggataaatacgtctttccagacagggatattttggatatagcaactcctttgtgacttccctgcagttaactgcctaaagcagtacatacaaatgaaagatggtaatgccttttatatcattccccaacctatcccatgccatacattatcagaagccagtctgatgtcatattcaaactaattcagttccttcagactaygcattttatagtgctagaaccctagaatgtacttaagtactttgtaagaaagtctgcccattaattattttcactcctggaagccacaccatagcttttaaggagatagaaaaacttgttttgatatattgttatttaatcctactggaaatgaaagttgacctcttttctatattcaaagatacactatttaaattctgtgatctctttcaagtggcataaaactcaaactgctaattattcttataggcttatcatacacaagctacctactacatttactgtacttatcatcattga

SEQ ID NO: 93293 - DNA, 600 bp, Chicken  19866894411671_8
cttttctatattcaaagatacactatttaaattctgtgatctctttcaagtggcataaaactcaaactgctaattattcttataggcttatcatacacaagctacctactacatttactgtacttatcatcattgaaacaatgcagaattcctgttgtcctataaagctaccttttgtgaaggcacaaagttgaaaaccattacaagtagtttcatattcagggtcactacaaatgcatcccaggatgtatgcaagacatagctcccaacagtttctccatgcgtatataggaagaaaarggagactgttttcttcctttgtagtaaataatcttcctgcacacatgtactgacaaagctgagcattactgctatcattacagctctagcatgatacaacaactcttcgagatattggtatatctgatcatatttccacctgttcatctgtactattagatccaaatgacaaatacatatatttctgtataaaatagattgttaaaccaaatagcactcaaagtttgtccttctacttttctcacagaactattaaacccgcctttttttttttttttttctccttttctcttctttttt

SEQ ID NO: 93294 - DNA, 600 bp, Chicken  19866894411674_1
tcgctcacagggctcttaagcatcttgttttgcagatcaaaagtgtctcctgtttgtgttgcaaggaaacagttcgacacttcattacaaccccaaacaaggaggctttgatctgcaagatagcatcagatgtttcaagatgtaacaagccaggttggtgctcacacttaaagcagaggggtgaaagggccccctttgctattatgggattgcacctctcaatagcagccttgagtttctttgtttctattccagattgaaataaaaatgagttttgaaatgttaaaggggttctgcgcsgggcaagcagaggagctgcctgcctcctgccgctgcctcctcactcctcatttcyctccttggaaatcaaggtgttctcaattggtgataagaagatgagctcaggagatttcatattcattgtgctaatctgtacrgcatcgagctccagcttctggagaggagagtgtaaaaagcagagargaattgataaacataggatgagtgcaaatgacaatgctaaataagcgatgtctcaactgcaaggtctgggggttgggagaagaaacatctggagctgcttttatttgccttttgaat

SEQ ID NO: 93295 - DNA, 516 bp, Chicken  19866894411674_10
ctcatttctctcttaaattggaaccagatgaggcagctccagcaatcagctcccagagcttggawggggaaatgaaaatgcaggagcatgggcctagcatgtgcccattcatcccaccttccattcatctcatcatccatycatccatctatccatccatcccatggatggagtcttggctgagccagcgtgtgccctggatgcattttgcccaaaggatatcagagcaatgcagcratgcaaatgggtacatgtagtgtgtgtccatcccattgcaaagaaccaaattcagctgagcaygggagtggacaggaatgtttaatcaaagcaacttgggcagttgctggtgtagtttgcaagcagggtttggtcctggtggtcccatggtgatgaatcactgggaaagtcctggagataaaggagattggtgcacaagggcatcaacacccagctacgcaaagaacatcacagctactccatcgctcagtggggctgagcccagttagactcaacagg

SEQ ID NO: 93296 - DNA, 600 bp, Chicken  19866894411674_2
gtgttgcaaggaaacagttcgacacttcattacaaccccaaacaaggaggctttgatctgcaagatagcatcagatgtttcaagatgtaacaagccaggttggtgctcacacttaaagcagaggggtgaaagggccccctttgctattatgggattgcacctctcaatagcagccttgagtttctttgtttctattccagattgaaataaaaatgagttttgaaatgttaaaggggttctgcgcsgggcaagcagaggagctgcctgcctcctgccgctgcctcctcactcctcatttcyctccttggaaatcaaggtgttctcaattggtgataagaagatgagctcaggagatttcatattcattgtgctaatctgtacrgcatcgagctccagcttctggagaggagagtgtaaaaagcagagargaattgataaacataggatgagtgcaaatgacaatgctaaataagcgatgtctcaactgcaaggtctgggggttgggagaagaaacatctggagctgcttttatttgccttttgaatcctgtgcttgttgggtatggcatggccagactttaaagccttccaaagaagacag

SEQ ID NO: 93297 - DNA, 600 bp, Chicken  19866894411674_3
agatgtaacaagccaggttggtgctcacacttaaagcagaggggtgaaagggccccctttgctattatgggattgcacctctcaatagcagccttgagtttctttgtttctattccagattgaaataaaaatgagttttgaaatgttaaaggggttctgcgcsgggcaagcagaggagctgcctgcctcctgccgctgcctcctcactcctcatttcyctccttggaaatcaaggtgttctcaattggtgataagaagatgagctcaggagatttcatattcattgtgctaatctgtacrgcatcgagctccagcttctggagaggagagtgtaaaaagcagagargaattgataaacataggatgagtgcaaatgacaatgctaaataagcgatgtctcaactgcaaggtctgggggttgggagaagaaacatctggagctgcttttatttgccttttgaatcctgtgcttgttgggtatggcatggccagactttaaagccttccaaagaagacagrgatgcccagaaacttgcatctgtcttctgttaagagcctgttaggagaccagggctgtcgtttaatcctagaccatagcaa

SEQ ID NO: 93298 - DNA, 600 bp, Chicken  19866894411674_4
aaagggccccctttgctattatgggattgcacctctcaatagcagccttgagtttctttgtttctattccagattgaaataaaaatgagttttgaaatgttaaaggggttctgcgcsgggcaagcagaggagctgcctgcctcctgccgctgcctcctcactcctcatttcyctccttggaaatcaaggtgttctcaattggtgataagaagatgagctcaggagatttcatattcattgtgctaatctgtacrgcatcgagctccagcttctggagaggagagtgtaaaaagcagagargaattgataaacataggatgagtgcaaatgacaatgctaaataagcgatgtctcaactgcaaggtctgggggttgggagaagaaacatctggagctgcttttatttgccttttgaatcctgtgcttgttgggtatggcatggccagactttaaagccttccaaagaagacagrgatgcccagaaacttgcatctgtcttctgttaagagcctgttaggagaccagggctgtcgtttaatcctagaccatagcaacttttatgctaatagtactgaggctcaccaggaaacgaggagccaa

SEQ ID NO: 93299 - DNA, 600 bp, Chicken  19866894411674_5
tccttggaaatcaaggtgttctcaattggtgataagaagatgagctcaggagatttcatattcattgtgctaatctgtacrgcatcgagctccagcttctggagaggagagtgtaaaaagcagagargaattgataaacataggatgagtgcaaatgacaatgctaaataagcgatgtctcaactgcaaggtctgggggttgggagaagaaacatctggagctgcttttatttgccttttgaatcctgtgcttgttgggtatggcatggccagactttaaagccttccaaagaagacagrgatgcccagaaacttgcatctgtcttctgttaagagcctgttaggagaccagggctgtcgtttaatcctagaccatagcaacttttatgctaatagtactgaggctcaccaggaaacgaggagccaataacacaggcacamcccagcccacccctcagccctgctggatgacctgttgagctccccaaaggtcatattctctctgcttgacctgcacagacttcctgtaatgggagccacatggcccggctcctccaagctcatttctctcttaaattggaaccagatgaggcagctcca

SEQ ID NO: 93300 - DNA, 600 bp, Chicken  19866894411674_6
aggatgagtgcaaatgacaatgctaaataagcgatgtctcaactgcaaggtctgggggttgggagaagaaacatctggagctgcttttatttgccttttgaatcctgtgcttgttgggtatggcatggccagactttaaagccttccaaagaagacagrgatgcccagaaacttgcatctgtcttctgttaagagcctgttaggagaccagggctgtcgtttaatcctagaccatagcaacttttatgctaatagtactgaggctcaccaggaaacgaggagccaataacacaggcacamcccagcccacccctcagccctgctggatgacctgttgagctccccaaaggtcatattctctctgcttgacctgcacagacttcctgtaatgggagccacatggcccggctcctccaagctcatttctctcttaaattggaaccagatgaggcagctccagcaatcagctcccagagcttggawggggaaatgaaaatgcaggagcatgggcctagcatgtgcccattcatcccaccttccattcatctcatcatccatycatccatctatccatccatcccatggatggagtcttggctg

SEQ ID NO: 93301 - DNA, 600 bp, Chicken  19866894411674_7
ttctgttaagagcctgttaggagaccagggctgtcgtttaatcctagaccatagcaacttttatgctaatagtactgaggctcaccaggaaacgaggagccaataacacaggcacamcccagcccacccctcagccctgctggatgacctgttgagctccccaaaggtcatattctctctgcttgacctgcacagacttcctgtaatgggagccacatggcccggctcctccaagctcatttctctcttaaattggaaccagatgaggcagctccagcaatcagctcccagagcttggawggggaaatgaaaatgcaggagcatgggcctagcatgtgcccattcatcccaccttccattcatctcatcatccatycatccatctatccatccatcccatggatggagtcttggctgagccagcgtgtgccctggatgcattttgcccaaaggatatcagagcaatgcagcratgcaaatgggtacatgtagtgtgtgtccatcccattgcaaagaaccaaattcagctgagcaygggagtggacaggaatgtttaatcaaagcaacttgggcagttgctggtgtagtttgcaagcaggg

SEQ ID NO: 93302 - DNA, 600 bp, Chicken  19866894411674_8
gaggctcaccaggaaacgaggagccaataacacaggcacamcccagcccacccctcagccctgctggatgacctgttgagctccccaaaggtcatattctctctgcttgacctgcacagacttcctgtaatgggagccacatggcccggctcctccaagctcatttctctcttaaattggaaccagatgaggcagctccagcaatcagctcccagagcttggawggggaaatgaaaatgcaggagcatgggcctagcatgtgcccattcatcccaccttccattcatctcatcatccatycatccatctatccatccatcccatggatggagtcttggctgagccagcgtgtgccctggatgcattttgcccaaaggatatcagagcaatgcagcratgcaaatgggtacatgtagtgtgtgtccatcccattgcaaagaaccaaattcagctgagcaygggagtggacaggaatgtttaatcaaagcaacttgggcagttgctggtgtagtttgcaagcagggtttggtcctggtggtcccatggtgatgaatcactgggaaagtcctggagataaaggagattggtgcacaagggcat

SEQ ID NO: 93303 - DNA, 579 bp, Chicken  19866894411674_9
ttctctctgcttgacctgcacagacttcctgtaatgggagccacatggcccggctcctccaagctcatttctctcttaaattggaaccagatgaggcagctccagcaatcagctcccagagcttggawggggaaatgaaaatgcaggagcatgggcctagcatgtgcccattcatcccaccttccattcatctcatcatccatycatccatctatccatccatcccatggatggagtcttggctgagccagcgtgtgccctggatgcattttgcccaaaggatatcagagcaatgcagcratgcaaatgggtacatgtagtgtgtgtccatcccattgcaaagaaccaaattcagctgagcaygggagtggacaggaatgtttaatcaaagcaacttgggcagttgctggtgtagtttgcaagcagggtttggtcctggtggtcccatggtgatgaatcactgggaaagtcctggagataaaggagattggtgcacaagggcatcaacacccagctacgcaaagaacatcacagctactccatcgctcagtggggctgagcccagttagactcaacagg

SEQ ID NO: 93304 - DNA, 600 bp, Chicken  19866894411677_1
aaaagcacgcctcacacaaagaagaatgatatctgctaggagaaaatcttatgtatttaaaaacagaaacaaaacagaagagatgatgacacagtaagagtaatcgaagggccttatttttttctgaggaagctgaaaatacatctctttgcattctgtgaggaagaaacttctggaaaatcttctaccctgtcagtgaacacagctatacacacaactcaaaggtttaatacttacagtggtttatatcctcccaccaggaagaagctcacatttaaaatgccttgcattctccccackaagggcctcttcagccctctgttttcagagatgtatttacaaatttcagactttccacagataagtaaattttctgtcatgttttgtttacgtctttgcaggcatggaataaagaaaactccaaaccaccactgaaagtttaatgatgacaagcacataaaaatggaagtgacaagattatttcgcagaaggaaattgtaactttccatatttaaaaaggtttgggtggattttattgttttaagtaggtaagaggtgttgatttgaaacccagggtagggggaggtttaatgatacaga

SEQ ID NO: 93305 - DNA, 600 bp, Chicken  19866894411686_1
aggagaattgtccaaaatgaaaaaagattcaccatggttgtctcctgtggctttggaacacgctgctgtgatgagatggcacttccacttctcctcttctccctatgctccttttgggtagtcaaaaaaacctcctatcccattgcagcaatccacatgcatctccccccttcctggtactttgcagttgccccaagaatggctctgtactgcgatgaccatgggaaccctgtgtgtgaggcagagacagagaagtcggctgctgagatctcgtgggtcccagagagcaactccacaccyagagcagacagtcacgataacgggacagtgactgttgtcagcwggtttgcagcacgcagcaccaacgggaagaatcctacctgcattgtgtcccacgcgactctgaacgagaccaagtccataaactgctcctcaygtaagcttccctttctatgctcagtgttcaaagtcccgtttagccctctgttcacattcttgctccacagctacagaaacctacagtgaaatcctatatagatgagttctatcccataccacttttgcttataaacttcaacagtttttttgcattccagacac

SEQ ID NO: 93306 - DNA, 600 bp, Chicken  19866894411686_2
cctgtggctttggaacacgctgctgtgatgagatggcacttccacttctcctcttctccctatgctccttttgggtagtcaaaaaaacctcctatcccattgcagcaatccacatgcatctccccccttcctggtactttgcagttgccccaagaatggctctgtactgcgatgaccatgggaaccctgtgtgtgaggcagagacagagaagtcggctgctgagatctcgtgggtcccagagagcaactccacaccyagagcagacagtcacgataacgggacagtgactgttgtcagcwggtttgcagcacgcagcaccaacgggaagaatcctacctgcattgtgtcccacgcgactctgaacgagaccaagtccataaactgctcctcaygtaagcttccctttctatgctcagtgttcaaagtcccgtttagccctctgttcacattcttgctccacagctacagaaacctacagtgaaatcctatatagatgagttctatcccataccacttttgcttataaacttcaacagtttttttgcattccagacactatttccaagtggtttattccctagaagggaagtacattgatg

SEQ ID NO: 93307 - DNA, 600 bp, Chicken  19866894411686_3
atcccattgcagcaatccacatgcatctccccccttcctggtactttgcagttgccccaagaatggctctgtactgcgatgaccatgggaaccctgtgtgtgaggcagagacagagaagtcggctgctgagatctcgtgggtcccagagagcaactccacaccyagagcagacagtcacgataacgggacagtgactgttgtcagcwggtttgcagcacgcagcaccaacgggaagaatcctacctgcattgtgtcccacgcgactctgaacgagaccaagtccataaactgctcctcaygtaagcttccctttctatgctcagtgttcaaagtcccgtttagccctctgttcacattcttgctccacagctacagaaacctacagtgaaatcctatatagatgagttctatcccataccacttttgcttataaacttcaacagtttttttgcattccagacactatttccaagtggtttattccctagaagggaagtacattgatgcattagtgttcttttggtatttggaaagctttaggaagaagcgtcagagtagacatgctcttattgttaaaataaccatgtggaagtaggtca

SEQ ID NO: 93308 - DNA, 600 bp, Chicken  19866894411689_1
tgctgtctgaatcaggtgtggggaataaggatactgtagacatgagtatgaaagaaagatatagtgactgctggcatgcttatattatcatcatttttatcactacttaatttcatccagtagagttctgatcagaattgcttgcatttctagaacacaccacacatgactgatctctctcatatcctcaggatgtttaacatggcctgtgttcaggctatgcatagtaaatggtacttttagcatagagcagtaatatataatgttagtgcaattcagattgctctggttcaacttacrtattcattgtgaatattttgagagtgagatgtaatctcttcttttgtttttttagtctcctaaaataggattactgtttctttactattacctggagaacgttgttcttaagaaataaaattaagaattctttacactgtgatgttacattaatacattctaacttccaatcccattgctgctgttttgaattgcagctgacttcaatagcaacaagactagctgtgaaatggggtatgggttctgaactagcacaagagaaagcacaacaacagagcaacaagatcccaagatctccag

SEQ ID NO: 93309 - DNA, 600 bp, Chicken  19866894411690_1
tgcccagagtgcctgtggatgccttatccctggaagtgttcagggccaggctgaatggggctttgggaaacttgtcttacggttctatgaaatactgctttattcagagtttctgaacaatattaggtatttcagtcaggtaatgtttcacattcttctgctaaagataaatgaaaacaagtttgttgctattagtattttaatctgatattggcaataacaatgaaaacaataatatgaggtctttttttagtacagctcctgtataatcttctatagactttaaacagtgggattttstggagtcagtaagaggtaggatgactttacagagaaagttatttaggtcttgaagttctgaacatgttttatgcttttccatttcatgtattacacaagaaagagtattaaatcttagtgttactatagctagctcttaatcactgtatctttttttaagctatggtatttcttcagcctgatgtattgcctgttaacagagttcattttccagagaactcacaatctaacaagtcataattgcctgctactcagagcgcttaacacaagctctgtgataaactttttccttataattaa

SEQ ID NO: 93310 - DNA, 600 bp, Chicken  19866894411692_1
ggcctggcttcccctgcagccaccgtcagtcaccgcagagcgctgtgctgggagcccatggctgctacagccaccaccagcacagggaggacccttcggatgctctgcagtgaggagctcggggagcccatgggctgcgccggatgcagcagtaatggcagcagtttcctgggttagcctggattattggactggttttcagtaagagaaattattagagcaatgtaatttaaatggtgagatttttagctttgtgggtctcttaaatgacagaaaggcgttcatctttgagtattccaygtgcagcatctcggtaattygtgtttttagtatggttttactggacaaattattttactttacctggaaagtatttttaattccctttatcttctggaaattgtcatttgtaatatttaagttcttttaatttacaattttagaacgtttcacatagctgaaatccttagctgccattgtcacctcctatttaaaacaaagtaactattacaaagtctattttgatgactcatgacctagctgcatattaaataaagtatctgttttttatgaccctctttggctgtactccttgtagcc

SEQ ID NO: 93311 - DNA, 600 bp, Chicken  19866894411692_2
caccgtcagtcaccgcagagcgctgtgctgggagcccatggctgctacagccaccaccagcacagggaggacccttcggatgctctgcagtgaggagctcggggagcccatgggctgcgccggatgcagcagtaatggcagcagtttcctgggttagcctggattattggactggttttcagtaagagaaattattagagcaatgtaatttaaatggtgagatttttagctttgtgggtctcttaaatgacagaaaggcgttcatctttgagtattccaygtgcagcatctcggtaattygtgtttttagtatggttttactggacaaattattttactttacctggaaagtatttttaattccctttatcttctggaaattgtcatttgtaatatttaagttcttttaatttacaattttagaacgtttcacatagctgaaatccttagctgccattgtcacctcctatttaaaacaaagtaactattacaaagtctattttgatgactcatgacctagctgcatattaaataaagtatctgttttttatgaccctctttggctgtactccttgtagccatcagcagggctggcactga

SEQ ID NO: 93312 - DNA, 600 bp, Chicken  19866894411694_1
gatattatgggtttggttgctgaatgcagctcagatgtggagaaaagctcagatgagagagcggcggagcgctcagtctgcagtgttgctgtgatctgctgtggagcagtaaaagtgttctgctttttctccctcccttcctcataggattaactcataaccaatataaaagtgacaaaaagcaaagtgtctcattgaaagctttactgtgaaaaagcctgcagatgttttcaaacgtccttttattcaaactgtgggggcaatttgaccctgtaataacttcacagttgtttatgataygattccatcrcaagcctctgcacaaaacttaygctgcartgagccagacaaggtgttatttctgcagtagaaccccytcccccaaaaygttattcatagaagacttggactgcttttcttttaattccaaatattcatttctctcttctacttcactttggatcagcttcattgcctgagtcactctggagagggaagtttcttgcttagccctyctccatgcaaacaggactggagaaacagctccctcattacctgatagatgatgcattagagtctgaggatcttgtcaggaatatg

SEQ ID NO: 93313 - DNA, 600 bp, Chicken  19866894411694_2
gtttggttgctgaatgcagctcagatgtggagaaaagctcagatgagagagcggcggagcgctcagtctgcagtgttgctgtgatctgctgtggagcagtaaaagtgttctgctttttctccctcccttcctcataggattaactcataaccaatataaaagtgacaaaaagcaaagtgtctcattgaaagctttactgtgaaaaagcctgcagatgttttcaaacgtccttttattcaaactgtgggggcaatttgaccctgtaataacttcacagttgtttatgataygattccatcrcaagcctctgcacaaaacttaygctgcartgagccagacaaggtgttatttctgcagtagaaccccytcccccaaaaygttattcatagaagacttggactgcttttcttttaattccaaatattcatttctctcttctacttcactttggatcagcttcattgcctgagtcactctggagagggaagtttcttgcttagccctyctccatgcaaacaggactggagaaacagctccctcattacctgatagatgatgcattagagtctgaggatcttgtcaggaatatgaatccaggct

SEQ ID NO: 93314 - DNA, 600 bp, Chicken  19866894411694_3
agatgtggagaaaagctcagatgagagagcggcggagcgctcagtctgcagtgttgctgtgatctgctgtggagcagtaaaagtgttctgctttttctccctcccttcctcataggattaactcataaccaatataaaagtgacaaaaagcaaagtgtctcattgaaagctttactgtgaaaaagcctgcagatgttttcaaacgtccttttattcaaactgtgggggcaatttgaccctgtaataacttcacagttgtttatgataygattccatcrcaagcctctgcacaaaacttaygctgcartgagccagacaaggtgttatttctgcagtagaaccccytcccccaaaaygttattcatagaagacttggactgcttttcttttaattccaaatattcatttctctcttctacttcactttggatcagcttcattgcctgagtcactctggagagggaagtttcttgcttagccctyctccatgcaaacaggactggagaaacagctccctcattacctgatagatgatgcattagagtctgaggatcttgtcaggaatatgaatccaggctcttctctggggtgcacagcaac

SEQ ID NO: 93315 - DNA, 600 bp, Chicken  19866894411694_4
gagaaaagctcagatgagagagcggcggagcgctcagtctgcagtgttgctgtgatctgctgtggagcagtaaaagtgttctgctttttctccctcccttcctcataggattaactcataaccaatataaaagtgacaaaaagcaaagtgtctcattgaaagctttactgtgaaaaagcctgcagatgttttcaaacgtccttttattcaaactgtgggggcaatttgaccctgtaataacttcacagttgtttatgataygattccatcrcaagcctctgcacaaaacttaygctgcartgagccagacaaggtgttatttctgcagtagaaccccytcccccaaaaygttattcatagaagacttggactgcttttcttttaattccaaatattcatttctctcttctacttcactttggatcagcttcattgcctgagtcactctggagagggaagtttcttgcttagccctyctccatgcaaacaggactggagaaacagctccctcattacctgatagatgatgcattagagtctgaggatcttgtcaggaatatgaatccaggctcttctctggggtgcacagcaacaggatga

SEQ ID NO: 93316 - DNA, 600 bp, Chicken  19866894411694_5
ctgcagtgttgctgtgatctgctgtggagcagtaaaagtgttctgctttttctccctcccttcctcataggattaactcataaccaatataaaagtgacaaaaagcaaagtgtctcattgaaagctttactgtgaaaaagcctgcagatgttttcaaacgtccttttattcaaactgtgggggcaatttgaccctgtaataacttcacagttgtttatgataygattccatcrcaagcctctgcacaaaacttaygctgcartgagccagacaaggtgttatttctgcagtagaaccccytcccccaaaaygttattcatagaagacttggactgcttttcttttaattccaaatattcatttctctcttctacttcactttggatcagcttcattgcctgagtcactctggagagggaagtttcttgcttagccctyctccatgcaaacaggactggagaaacagctccctcattacctgatagatgatgcattagagtctgaggatcttgtcaggaatatgaatccaggctcttctctggggtgcacagcaacaggatgagaagcaacaggcagaggctgaaacagaaatggttttga

SEQ ID NO: 93317 - DNA, 600 bp, Chicken  19866894411694_6
ctgtgatctgctgtggagcagtaaaagtgttctgctttttctccctcccttcctcataggattaactcataaccaatataaaagtgacaaaaagcaaagtgtctcattgaaagctttactgtgaaaaagcctgcagatgttttcaaacgtccttttattcaaactgtgggggcaatttgaccctgtaataacttcacagttgtttatgataygattccatcrcaagcctctgcacaaaacttaygctgcartgagccagacaaggtgttatttctgcagtagaaccccytcccccaaaaygttattcatagaagacttggactgcttttcttttaattccaaatattcatttctctcttctacttcactttggatcagcttcattgcctgagtcactctggagagggaagtttcttgcttagccctyctccatgcaaacaggactggagaaacagctccctcattacctgatagatgatgcattagagtctgaggatcttgtcaggaatatgaatccaggctcttctctggggtgcacagcaacaggatgagaagcaacaggcagaggctgaaacagaaatggttttgactgaagataag

SEQ ID NO: 93318 - DNA, 581 bp, Chicken  19866894411694_7
agcctgcagatgttttcaaacgtccttttattcaaactgtgggggcaatttgaccctgtaataacttcacagttgtttatgataygattccatcrcaagcctctgcacaaaacttaygctgcartgagccagacaaggtgttatttctgcagtagaaccccytcccccaaaaygttattcatagaagacttggactgcttttcttttaattccaaatattcatttctctcttctacttcactttggatcagcttcattgcctgagtcactctggagagggaagtttcttgcttagccctyctccatgcaaacaggactggagaaacagctccctcattacctgatagatgatgcattagagtctgaggatcttgtcaggaatatgaatccaggctcttctctggggtgcacagcaacaggatgagaagcaacaggcagaggctgaaacagaaatggttttgactgaagataaggagggttttgtgacaataaggaggttttcagaacttatgtggatccctgagcaatgcgttatgatcttgtagcagaccctacttgagctggatagtaaactcaaaact

SEQ ID NO: 93319 - DNA, 600 bp, Chicken  19866894411700_1
aattcttgatgttttgtttcatgtttccatgccatctttaataatcatgagtagaaattctcctttaaaatgaaaataaagattcttaaatcagcatacatttctattaaaaaaaaaacaaaacacaaaacaaataaacaaaacagaaaataattagggatatgccaaaaaggaaaaggaaaaggaaaaggaaaaggaaaaggaaaaggaaaaggaaaaggaaaaggaaaaggaaaaggaaaagaaagaaaaggaaaaaactgccacgattatggaagaggattatggacttgtacttgyattttgaatactgcaccacaagtgagcctaaagcagctgcttcattacctcaaaatacacaggagaaagacagagggcatagagttgatgtcaaacgctactggcactgtgtcaaatttttaagtcttaatttacatatatgcacctatttgcactttgcaggtgcaaaggtcaattactgcaagcataattaacatattactgccaagagttgttcagctattcaggcaaaatgaagatttgaataacaaagcatgataactagatgctgtattaaaggatgagtaataaaatttagta

SEQ ID NO: 93320 - DNA, 599 bp, Chicken  19866894411701_1
  misc_feature (1)..(126): n is any nucleotide
nnnnnnnnnnnnnnnnnnnnnnnnnnnnnnnnnnnnnnnnnnnnnnnnnnnnnnnnnnnnnnnnnnnnnnnnnnnnnnnnnnnnnnnnnnnnnnnnnnnnnnnnnnnnnnnnnnnnnnnnnnnnnnctgcgtgcatagctgctgctgttggttcacagctgccacagctcctgagggattgtcatgtctttggccaaggcccacttcgaggtgatctcctcaaacttgtcagcactggacctggcttcattctccagcttctccaccctgtggacagtagaagaaggtaaaccagggcarggcagcaagtggttcagtggcccataccacatacaaagccacaggaacattctcctgaataacttagcttgaaaagtggcatcaagatatcagtgaagcagcaggtgagaggtgacacaactcccagctacacagtccaaccctggagaatcaaaaggactgaaaccttctttatgggcagtttctgggcacagcatccagcatcttacagatattctcactagaaaaaaaatccgagcagggaactgatgtcttgctccagccagcctcccacaaactgttcctacagtgccctccaa

SEQ ID NO: 93321 - DNA, 600 bp, Chicken  19866894411701_2
gcaagtggttcagtggcccataccacatacaaagccacaggaacattctcctgaataacttagcttgaaaagtggcatcaagatatcagtgaagcagcaggtgagaggtgacacaactcccagctacacagtccaaccctggagaatcaaaaggactgaaaccttctttatgggcagtttctgggcacagcatccagcatcttacagatattctcactagaaaaaaaatccgagcagggaactgatgtcttgctccagccagcctcccacaaactgttcctacagtgccctccaaaggcractaagagaaaggcctcggtgtttcttagctgatctgcaggcaaggctgaaacagtccgtcccttggagatccctctggtggagcagaacaggttggccaagtcagaaacagagagaatggagaataactggggctggaagagyctcaggaaaataccgggtcctggttaatgcgggattaacatcaatgccagcagagcacattgtgcagggcctcattcaggcaagtgttgagtatctccaaggaggaagatccctacatcaccatgggccccttagctagcatctgaccacgctcac

SEQ ID NO: 93322 - DNA, 532 bp, Chicken  19866894411701_3
aatcaaaaggactgaaaccttctttatgggcagtttctgggcacagcatccagcatcttacagatattctcactagaaaaaaaatccgagcagggaactgatgtcttgctccagccagcctcccacaaactgttcctacagtgccctccaaaggcractaagagaaaggcctcggtgtttcttagctgatctgcaggcaaggctgaaacagtccgtcccttggagatccctctggtggagcagaacaggttggccaagtcagaaacagagagaatggagaataactggggctggaagagyctcaggaaaataccgggtcctggttaatgcgggattaacatcaatgccagcagagcacattgtgcagggcctcattcaggcaagtgttgagtatctccaaggaggaagatccctacatcaccatgggccccttagctagcatctgaccacgctcaccatgaagacatatatatccactttctcacattagtacagcctcacatttttcctcgtgtatcctcatacacaactg

SEQ ID NO: 93323 - DNA, 600 bp, Chicken  19866894411703_1
actgtcacaatgatacaagtgtctgacactgcctttaagaggctggtttacacagaaggcagaggtctggttgcacttattcctctctggctcagacagaacttgcagtgtacatgtgcaagtgagaagaccatgtgtgaccagctctctgatatgcattatttatataacagttctactgactgaaaaactaataaatccacagtctgcagatgatgtgcagacatacaaacacatcatcacaaatatcactttatcttgattctttgctggcttttgttggttttgtgtttttttttycttttcctccctgctgcagcatagtagaacatctagaagaagtacaatagcaaaacaagcctctgtctaaaaaaccttatttaaatcacaatggttcattcaggccacttcccctagggataagtgtcattttccagggaacatttctagatgaatatttcacatagatcaaactttgtcaaactcaattgtgaagcagtgctgcaaggagatctgtatctccttcactccgagtgccctccactcccagatcagcttttcagtgatggagacccatgtaggtcggtctctctgaaagta

SEQ ID NO: 93324 - DNA, 600 bp, Chicken  19866894411714_1
catgcttctgacttcctacattgttacataccacagggagagaaataaaacaaaaactaaacaaaacataacgggcctccaactgggacaatgtctatcagaacacatagcttttacaatttgctttcaactttgcaggaagatttgtctctgacttcagattaaacaatgaaaaagtctaaatccacagccaagacttttctagtgccaaaggaattttgtaatacttgacaacttccacctctctctcacatgcatccagcacaacccagcaaagctggagagcacgtgacatagcgrtaacaaagcaragctgcctctccatcggctcagaacaggtacagccctgaacagctgaaataccttcggcagttcaggcagtattagctcrcacactaataatatcttgcaaacaaaaagaaggaatggtaaaaacaaaagccagtttctaaatactccctcacagttcctttatttcaagtctaccattacctaccacagaaccgtcagggttccaagaaccatcagaagttccaaggaatttaagaccagaaggagtattaaaatcatctagtacaaacagcacaaccattcccatac

SEQ ID NO: 93325 - DNA, 600 bp, Chicken  19866894411714_2
cttcctacattgttacataccacagggagagaaataaaacaaaaactaaacaaaacataacgggcctccaactgggacaatgtctatcagaacacatagcttttacaatttgctttcaactttgcaggaagatttgtctctgacttcagattaaacaatgaaaaagtctaaatccacagccaagacttttctagtgccaaaggaattttgtaatacttgacaacttccacctctctctcacatgcatccagcacaacccagcaaagctggagagcacgtgacatagcgrtaacaaagcaragctgcctctccatcggctcagaacaggtacagccctgaacagctgaaataccttcggcagttcaggcagtattagctcrcacactaataatatcttgcaaacaaaaagaaggaatggtaaaaacaaaagccagtttctaaatactccctcacagttcctttatttcaagtctaccattacctaccacagaaccgtcagggttccaagaaccatcagaagttccaaggaatttaagaccagaaggagtattaaaatcatctagtacaaacagcacaaccattcccataccagagctacat

SEQ ID NO: 93326 - DNA, 600 bp, Chicken  19866894411714_3
tgtctatcagaacacatagcttttacaatttgctttcaactttgcaggaagatttgtctctgacttcagattaaacaatgaaaaagtctaaatccacagccaagacttttctagtgccaaaggaattttgtaatacttgacaacttccacctctctctcacatgcatccagcacaacccagcaaagctggagagcacgtgacatagcgrtaacaaagcaragctgcctctccatcggctcagaacaggtacagccctgaacagctgaaataccttcggcagttcaggcagtattagctcrcacactaataatatcttgcaaacaaaaagaaggaatggtaaaaacaaaagccagtttctaaatactccctcacagttcctttatttcaagtctaccattacctaccacagaaccgtcagggttccaagaaccatcagaagttccaaggaatttaagaccagaaggagtattaaaatcatctagtacaaacagcacaaccattcccataccagagctacatgcatagctggaagctgagctgcttgccactgttactaccactatgtaatgtgaacactgaaaggtggagacaaaccagca

SEQ ID NO: 93327 - DNA, 599 bp, Chicken  19866894411729_1
  misc_feature (1)..(10): n is any nucleotide
nnnnnnnnnncctatacttgcacatgcatctgttattctcttgatagcactagagtcctctgcagacagaaaggtgccatttagtctaatttgagatatcttgcctcacattcacaaatacgcagtggcatttggatgctatccttcctctctcttcatgttttcatctaaatggctaagaagataaattctttatattttttttctctttttaggggccttctggtctgccaggattcccagggcctcctggaccacccggacctcccgtaagttgagagttgtgaatgaatgtgagaracttcccatggggagtctagaattttcatcttgctgccagaacgtgtgtgttttatctgctgcaattaccatgagcactccctctctgggctgagtttcagcaacctctaaacactgcaccccggggagagcagtgacttcactggctgctcttcagtgtgtggatcatctcctgyttgkttattatttgctctgcttactgtttgcatgcatcttgaaggtaaagtgtgtgccagagacattatccctgtctgggagcccctaccacaggcagattcccacaggagactggattgttg

SEQ ID NO: 93328 - DNA, 600 bp, Chicken  19866894411729_2
taagaagataaattctttatattttttttctctttttaggggccttctggtctgccaggattcccagggcctcctggaccacccggacctcccgtaagttgagagttgtgaatgaatgtgagaracttcccatggggagtctagaattttcatcttgctgccagaacgtgtgtgttttatctgctgcaattaccatgagcactccctctctgggctgagtttcagcaacctctaaacactgcaccccggggagagcagtgacttcactggctgctcttcagtgtgtggatcatctcctgyttgkttattatttgctctgcttactgtttgcatgcatcttgaaggtaaagtgtgtgccagagacattatccctgtctgggagcccctaccacaggcagattcccacaggagactggattgttggtgtgtgttcttgttatgccagcgaggggtcttgaaacaagcaagacttagcttggctaagtttctttggaaggtcagataggccccatgagggccttcccccaatccctaaagagggccagrtacagctgctctcctgaaagtgctgccttcatggcctaaggctcgaggaccttt

SEQ ID NO: 93329 - DNA, 600 bp, Chicken  19866894411729_3
aagataaattctttatattttttttctctttttaggggccttctggtctgccaggattcccagggcctcctggaccacccggacctcccgtaagttgagagttgtgaatgaatgtgagaracttcccatggggagtctagaattttcatcttgctgccagaacgtgtgtgttttatctgctgcaattaccatgagcactccctctctgggctgagtttcagcaacctctaaacactgcaccccggggagagcagtgacttcactggctgctcttcagtgtgtggatcatctcctgyttgkttattatttgctctgcttactgtttgcatgcatcttgaaggtaaagtgtgtgccagagacattatccctgtctgggagcccctaccacaggcagattcccacaggagactggattgttggtgtgtgttcttgttatgccagcgaggggtcttgaaacaagcaagacttagcttggctaagtttctttggaaggtcagataggccccatgagggccttcccccaatccctaaagagggccagrtacagctgctctcctgaaagtgctgccttcatggcctaaggctcgaggacctttccca

SEQ ID NO: 93330 - DNA, 512 bp, Chicken  19866894411729_4
cggggagagcagtgacttcactggctgctcttcagtgtgtggatcatctcctgyttgkttattatttgctctgcttactgtttgcatgcatcttgaaggtaaagtgtgtgccagagacattatccctgtctgggagcccctaccacaggcagattcccacaggagactggattgttggtgtgtgttcttgttatgccagcgaggggtcttgaaacaagcaagacttagcttggctaagtttctttggaaggtcagataggccccatgagggccttcccccaatccctaaagagggccagrtacagctgctctcctgaaagtgctgccttcatggcctaaggctcgaggacctttcccaggctcatctgtgcatctccagtttgagtctgccatgcccattttgaggagcagtgcagctcataactaacactctaggttcaggggctgtttcacaccatgtggcgaggtatctgccctgtgctaattcagctgagctgggtttgtaaggtgcg

SEQ ID NO: 93331 - DNA, 599 bp, Chicken  19866894411734_1
  misc_feature (1)..(101): n is any nucleotide
nnnnnnnnnnnnnnnnnnnnnnnnnnnnnnnnnnnnnnnnnnnnnnnnnnnnnnnnnnnnnnnnnnnnnnnnnnnnnnnnnnnnnnnnnnnnnnnnnnnnnccagctgcaggcagccacctccagcctgaagtttacaaactagcattgtggtacctcttgttttgcaactttaaaatttatgaccagcttacagatgctgttctggagaatgttattttcctactgaacagactctgcaatgaaaaactctagatttcctggcctgctccgctgttcctcagccccattgaaatgactrcacttatgcactggtttccactgcagcctacatgcgctgcatcaaaacaagagaagctaatgagctgaaaagggtcatagctccatgggtatagggagagaatgacaggaagtatgccattaagtaataagttgatacattacagtagctcatgtccacatttattcctcctcagacaggcaagtacctgcattagtaaaaagctagctgaatgcattaaatgttggaaataatacacgaacgctattattttaagatggcagtggcttttctgctaaaaacttcatgactattwcaat

SEQ ID NO: 93332 - DNA, 600 bp, Chicken  19866894411734_2
gactrcacttatgcactggtttccactgcagcctacatgcgctgcatcaaaacaagagaagctaatgagctgaaaagggtcatagctccatgggtatagggagagaatgacaggaagtatgccattaagtaataagttgatacattacagtagctcatgtccacatttattcctcctcagacaggcaagtacctgcattagtaaaaagctagctgaatgcattaaatgttggaaataatacacgaacgctattattttaagatggcagtggcttttctgctaaaaacttcatgactattwcaatttctaattctcgtacttcatctgagcaaaattatcatgagtctcaagaccttagaaaattaattggaggaattcacagcatcaaaaatgtgttttacatgtctagacaaatctgattatcatcatgcccttcagaactatgctatacattcccagcatgtcagattttacatagcattaccattaaataaggcctaacttcagctgacaaatcagagtaatgactaggatgaatctggtaatttatttgagatttaactgactaattatgttaatgacaagcaaaataaagtattt

SEQ ID NO: 93333 - DNA, 600 bp, Chicken  19866894411736_1
tcattggacattggcataaaaagaattatagttgcttgtttatgaagatgtctgatttcgacccttccattctgagagcattagaatggaagatggattacttacctcatttgggtctttttgccacactgactgaaaagtgacaacttttcttcactttaatttcatcagtgcttgaatgatgataatgggacagttcgtaaggtaacacattatctttgctgtcctaatggcagtggcatacagctgtttctgttggctacctaagaaacaatcttagaatcctagagcgttaggggwttgtgaagttacacaagtatatgcatggctcctaccactaatggtgcttatttgccctctgttcttccatggtgtgtttgcacagagtacttgttctgatggagaacaagtcagtgatctgggaaaagattacagagttgcaagataatccatacttaacagcactcatgatttatgcatgtaaaacctgacttccagataagttatcccagtacctctttcaggagaaagctgtagatttcccttcagatcccctttggacctccagacaagattgtatcattgctctagttttctctg

SEQ ID NO: 93334 - DNA, 600 bp, Chicken  19866894411736_2
ggagaaagctgtagatttcccttcagatcccctttggacctccagacaagattgtatcattgctctagttttctctgaaaactggaagagaaatgagaatgtggatgatgtcttttccgctttcatgatgcagctgttggccctgacgcttctttaaatggccttcagccaaaaggcaggatgcttgtgttctgtggttgttgcttgtcattcctgtcatcttcctcaaaacaaaaaataacaagactctttttggccatgctttacagtccctgtcttacctgcttcttccttcttaaygatgtatataacgtagtgagtggatccttatggtgttggccaaggaaggtccacgtcttcggctgtaacagtacattgggaggcctggtgagatatgaagcttgaactgacttgattcttcccctttgcttataggtgggtagaagtgtctgaagtgatttatggagcctgcctggatcttgatttcagtacaatcctagtgataaagctttctactgtcaagttctaaatataaaataaaattgttttttatttattctactgtgctttcttgctaattagtacatctacacttgtgag

SEQ ID NO: 93335 - DNA, 600 bp, Chicken  19866894411742_1
cttctctttctgatgataaaggagttttctttgcccacatcttatggcttaaccaggccatattgctctggttttctcccacagtgccttaaaggctgagctgtgggagcccaaatgtgaggctcccttcttctcaggtgggctcttcctggagctgcctggggctgggggacctgagcaacctcttgctggaagggctgcttctgcattcagagatgaaccatttaaaattcaaatatatgtgttccttgttcctaagctgattgacttccatttccataggctggaagctcctcctgrtatttagatggccactgcatgccctcgtgctcttggggagtgtgtcccttatatatattctttataaatgaagcaggaaacccgtgctatttttctttcccagtttgtggcagggttgtgcaactataaatcacagtgactgtggagggcaggcttttaatttaatgatagccctaagtcacttttcctgtaactcacgtaccagatgatgctttctgaggatctctccaatttgagctgtaatgtttaaaatctaggaacacatttcccgtaatactccgtttcatatagttttcacct

SEQ ID NO: 93336 - DNA, 469 bp, Chicken  19866894411744_1
ttgaaacagcacagacattgcctgtaagaaaagaaataaaataaaatctcctgaaatctcagtaagattggactctatcaaaattgagttaaaaggaccaaaaaaggacaaattggaatactcagatgactaacaaaaaggactattcacattaagactattttaacaacaaaaatatttgactgacccataaaggcaatattacagtcagaaagattagtgtggtggaaaggcgatacaggagtggaacagcaaaagggacaaacaggaaaggaacggtcactcatctccgaagacctrggttcatgacaaaaaactccacaaaggctggatctccaaccagagatccttccacagtggcagtcagctcttaaatggggtcaagagaaggtggagccaggctccaccccttctggtcacacacacagctgaactgccttcaccttttgctcccagggctgacccagtc

SEQ ID NO: 93337 - DNA, 599 bp, Chicken  19866894411749_1
  misc_feature (1)..(201): n is any nucleotide
nnnnnnnnnnnnnnnnnnnnnnnnnnnnnnnnnnnnnnnnnnnnnnnnnnnnnnnnnnnnnnnnnnnnnnnnnnnnnnnnnnnnnnnnnnnnnnnnnnnnnnnnnnnnnnnnnnnnnnnnnnnnnnnnnnnnnnnnnnnnnnnnnnnnnnnnnnnnnnnnnnnnnnnnnnnnnnnnnnnnnnnnnnnnnnnnnnnnnnnnnctgaaacccttaggttacctttagagatagacctccagggcagagggggtagctgaagagctccaggctgcccttccactcactgaagcaagaagcacrttgcaattccttctgcattgcagggggttgctaagacaagggctgacagtattaatctgccacctccagcctgcagtggcagtgagcaacatcacctctgaattatggtctgctcttcagaatcaaggaggagtgtttggtaagggatgggagaggtgagtaactgtcctatcggmcaggaagcaaagtgtggttgctttcctttgcagcctcggcgtgcagatagttggcagctggggaagaaaaagtcaaagttgcatctccagcacgatgtgtttgtgtgtgctgaggcagaacta

SEQ ID NO: 93338 - DNA, 599 bp, Chicken  19866894411749_2
  misc_feature (1)..(25): n is any nucleotide
nnnnnnnnnnnnnnnnnnnnnnnnnctgaaacccttaggttacctttagagatagacctccagggcagagggggtagctgaagagctccaggctgcccttccactcactgaagcaagaagcacrttgcaattccttctgcattgcagggggttgctaagacaagggctgacagtattaatctgccacctccagcctgcagtggcagtgagcaacatcacctctgaattatggtctgctcttcagaatcaaggaggagtgtttggtaagggatgggagaggtgagtaactgtcctatcggmcaggaagcaaagtgtggttgctttcctttgcagcctcggcgtgcagatagttggcagctggggaagaaaaagtcaaagttgcatctccagcacgatgtgtttgtgtgtgctgaggcagaactaacaggcagacacttcacagggagacgtggaggtggataacgtggacttctcctctgagttctattaaaattctgtactgagctgtgacgtgatgtcagtggtgttttcacctggctcaagtagccagaaagacttgagagctttttgctctgctgctctaaagcagttccaaatgg

SEQ ID NO: 93339 - DNA, 600 bp, Chicken  19866894411761_1
gctgcctttaccacgaagagtcacgatcaggtataaacacccttttttttccagactctactcccataaatatgacgttgggctaatgctgtgacctgccttttccttcgcaaatccacgctggcagagattgccttatctacagtccacatctacacctcttcccagctgctgattctgctggttccagccttgaggttgtccagattgtccctttgtctgtttaagacctctgcactaaccatgctaatccccagtaagcaatcaaatctccccatctgtgcttctgtgatttccccyggcgccatggtaggacttctctattttaattaactagagctggatgccttgtcaagacttagctcctctgatttctcattatgttatcataataccatttagcaacaccaccctgctcagcaaaagaaactgatcccagccccttgaaggcagcacagcaagacaaagagaactcagcagggcccacactgatactcagctgcactcttatgaagtggctgcatctctcccccaggaaatattccagttcttacctactcacaaaaatacatttcaaaatgcatttccttgtttcctttt

SEQ ID NO: 93340 - DNA, 600 bp, Chicken  19866894411762_1
cacatctacccttttactgaacgcctcccagggatgctgactgcacaaagaagcgtctactgtctctgggatcaaagcatgccatattttttttaaccttatagactggcaataagatttctacagtcagttaaagagcagcgattcacagggaagaatccagaatggttgtggaggcacactgaaggggcagagaagttctattaaaccctaaggaagatggatctaggatgcttggttctctagcctgcagtgaagagagaaggatgcggcacttggttagaactgagagaaggatgkgaatggaactggaagaccatcttgggcaggtctgcaggcaggagagagcagcccccagctttcagcacgctgttggcaggtgtgccccttcccaaatggcagtgtccaaaccttgccatggtcctaccttggacttactacttgatcttttaaaagctcccgtcagacatctgctaatatggatgagactgctgcttctttcattgatctgaacagattaaagtatttgtacataagaatagtttagcaacgagctttaatttaattagtctattagatcagaaattctccttgaatctc

SEQ ID NO: 93341 - DNA, 599 bp, Chicken  19866894411763_1
  misc_feature (1)..(84): n is any nucleotide
nnnnnnnnnnnnnnnnnnnnnnnnnnnnnnnnnnnnnnnnnnnnnnnnnnnnnnnnnnnnnnnnnnnnnnnnnnnnnnnnnnnnctgggatgcatcaaaaagagtgtggctagtaggttaagttagatgatcccctcccccacctactctgtcctggtgaggccacatctggagtactgtgcccagttctgggctcctcagttcgagaaagatggggaacttctggagagagtccagcaaagggcgacaaagatgattagggctctggagcaacacccttatggggaatggctgagagayctggaactgatcagcctggagaagactaagagaagatcttaccagtgcttataaatgtataaggacaggaggcaagtgactgggaacaggctctttccaatagtgcctagtgacataacaaggggaaacagacataaactggaacacaagaagttccatatgaacttcaggaaaagcttcttttctttgagggygacagctctcaaaaatgttgcccagagaggttgtgtagactccttttctggaggtactcaaaaccttcctggaaactttcctgtgtaaccttctttaagaacata

SEQ ID NO: 93342 - DNA, 600 bp, Chicken  19866894411763_2
tcctcagttcgagaaagatggggaacttctggagagagtccagcaaagggcgacaaagatgattagggctctggagcaacacccttatggggaatggctgagagayctggaactgatcagcctggagaagactaagagaagatcttaccagtgcttataaatgtataaggacaggaggcaagtgactgggaacaggctctttccaatagtgcctagtgacataacaaggggaaacagacataaactggaacacaagaagttccatatgaacttcaggaaaagcttcttttctttgagggygacagctctcaaaaatgttgcccagagaggttgtgtagactccttttctggaggtactcaaaaccttcctggaaactttcctgtgtaaccttctttaagaacatactatatcaggactacataatttccagctccattccaaccctacaattctgtgattctgtgatatggaagggacttataaaaatcactctgataacttcagttctgttacatgctacatttcaagtaccaaattagttcctagttagaaaacttttactttttaactcttcrtacataaatgacattgctgaaaat

SEQ ID NO: 93343 - DNA, 600 bp, Chicken  19866894411763_3
gaaaagcttcttttctttgagggygacagctctcaaaaatgttgcccagagaggttgtgtagactccttttctggaggtactcaaaaccttcctggaaactttcctgtgtaaccttctttaagaacatactatatcaggactacataatttccagctccattccaaccctacaattctgtgattctgtgatatggaagggacttataaaaatcactctgataacttcagttctgttacatgctacatttcaagtaccaaattagttcctagttagaaaacttttactttttaactcttcrtacataaatgacattgctgaaaatgacaggaaataaataagaaatatttgattaatcattcgtgtgttaaatgggttttatattatttgtgttcattaataatttgctctatatatgatccacaacttttagctagctatagtttcttgctttatgagtcattgtgcttaaattacaaaatgaatttcaatttaatttgatagctacatgtactactatttttctactgaaagacctgtagttcagttactgatgctaaatcagttcttacaaattggcacaaaactgtcattactaaaa

SEQ ID NO: 93344 - DNA, 600 bp, Chicken  19866894411769_1
atgatttcaagtttagatataaaaaaaagaaaatccaattagagaatctgatacagctacttaaagaataaatgacaagtaggcaacaaatcctaatgcaaagatatcgtaacctagaatttcttttattttttcaagcagcactaattcctctgagcctcaagtcacagtacatgcaaacaatgtaaataaatataatcaacactgaactgcaacagctgcttgttcacacaaatatcaccaagaaagtaaaagggcagggaggacaaggaaatgaaacccacataagacgactcctgytctacacattattctcctgtaaaatgaattccagaaaatataagcwtgggcatacagttcaatcccatcctttgctaaaaaggttctattgcaagaagtaatcattattgaaccttttcgttcagatgcaatttcttacatgttacaacaagtttcacgtgcattgtgaatttcagccaaggttgatgaagttcaataacttggctaaccaaccatgtgtgctactcattacagaagtaataaatagattcatcaaaaygggcatgaaaagcaatatgaacatctgacaccattttcagc

SEQ ID NO: 93345 - DNA, 600 bp, Chicken  19866894411769_2
tctgatacagctacttaaagaataaatgacaagtaggcaacaaatcctaatgcaaagatatcgtaacctagaatttcttttattttttcaagcagcactaattcctctgagcctcaagtcacagtacatgcaaacaatgtaaataaatataatcaacactgaactgcaacagctgcttgttcacacaaatatcaccaagaaagtaaaagggcagggaggacaaggaaatgaaacccacataagacgactcctgytctacacattattctcctgtaaaatgaattccagaaaatataagcwtgggcatacagttcaatcccatcctttgctaaaaaggttctattgcaagaagtaatcattattgaaccttttcgttcagatgcaatttcttacatgttacaacaagtttcacgtgcattgtgaatttcagccaaggttgatgaagttcaataacttggctaaccaaccatgtgtgctactcattacagaagtaataaatagattcatcaaaaygggcatgaaaagcaatatgaacatctgacaccattttcagcttactcaataagaaaaataaattacgtaagtccaagaggacccttt

SEQ ID NO: 93346 - DNA, 507 bp, Chicken  19866894411769_3
gggaggacaaggaaatgaaacccacataagacgactcctgytctacacattattctcctgtaaaatgaattccagaaaatataagcwtgggcatacagttcaatcccatcctttgctaaaaaggttctattgcaagaagtaatcattattgaaccttttcgttcagatgcaatttcttacatgttacaacaagtttcacgtgcattgtgaatttcagccaaggttgatgaagttcaataacttggctaaccaaccatgtgtgctactcattacagaagtaataaatagattcatcaaaaygggcatgaaaagcaatatgaacatctgacaccattttcagcttactcaataagaaaaataaattacgtaagtccaagaggaccctttaatatttacagtaggtatgaagtagacagtagcagccttatgtgaaacagagcaataccagtattccacagcattaagccagagtaaaacatgactaccactgctctagaaaaaactcat

SEQ ID NO: 93347 - DNA, 600 bp, Chicken  19866894411771_1
tcactgcatttgtggaatttatctgaaatattagtctaaatggtcacattttattatctttccataacattttactgcttgtgaaataaaaatcagtttaaatgcagtttgctgttgtctgcccagacataatgaataactctgaaataaatccaaatacattagcagcctgcttaattctcccctatagaagtgttattaatttacgtgttggaatatttcatgttctgctttgttgatcaagctattattttgtttgttaacgcagatggaagcatcagcactttagtacattccagrcatgctggtatagccaaaacaaattatgcatttttactgaccctgttagattatcacaaatttttaaatgaatttagcatttcgcacttgtgaatgtcctatctgtgaatgaatagttaattgcttttgtgttattacactgacaggctgcaaatgaagaacaacagttaaaatctctccgcttgaaagcttgctgcacatgctcacttccctttctgtcgtctttgctcttctgtgacaaatgtgctcatgaagctctgaaaactgcactggatttggcctggcagatgaggtggtatc

SEQ ID NO: 93348 - DNA, 600 bp, Chicken  19866894411772_1
aagaaacagcccatggtgcattgattctccatttctgcaggaggtgagtgggcatctctgagcacgagatgcagaagggcacagctcagggtcccacctctgcccaccctaatgcctgcatgcagtgcctcctcatgccccttggggcatgcagcaggaatgcaagctaaacccacacctatgtcccagcgctgctcctgggggttaaatgaggcaagtcgggcttgaggcttgctgtttgcccagacactgctagttatcctcatcttaattgccactgaaaaagagaaaatgtggcaygagtcccataggatgcaccccaccacccttgaagccactgagacccaaygctgagcccgcagagctccttcccaygaggagaaatccgtggaagtcaaaatctctccragaaagcagtcagttttgacacggttttcattyagagaacctcttcccttttgcgagggaaaagtgctttaaaatgtcaaaacactccgatatatttatttatttggagcaaaatgacatttcactttgaaatgtcagttaatttccagctttgaaagtttttacaagatgcagcagtcgaactgatttcct

SEQ ID NO: 93349 - DNA, 600 bp, Chicken  19866894411772_2
gggcatctctgagcacgagatgcagaagggcacagctcagggtcccacctctgcccaccctaatgcctgcatgcagtgcctcctcatgccccttggggcatgcagcaggaatgcaagctaaacccacacctatgtcccagcgctgctcctgggggttaaatgaggcaagtcgggcttgaggcttgctgtttgcccagacactgctagttatcctcatcttaattgccactgaaaaagagaaaatgtggcaygagtcccataggatgcaccccaccacccttgaagccactgagacccaaygctgagcccgcagagctccttcccaygaggagaaatccgtggaagtcaaaatctctccragaaagcagtcagttttgacacggttttcattyagagaacctcttcccttttgcgagggaaaagtgctttaaaatgtcaaaacactccgatatatttatttatttggagcaaaatgacatttcactttgaaatgtcagttaatttccagctttgaaagtttttacaagatgcagcagtcgaactgatttcctgacagtatcgagaygttctcaatgagcccggctggaacacggagggaag

SEQ ID NO: 93350 - DNA, 600 bp, Chicken  19866894411772_3
agggcacagctcagggtcccacctctgcccaccctaatgcctgcatgcagtgcctcctcatgccccttggggcatgcagcaggaatgcaagctaaacccacacctatgtcccagcgctgctcctgggggttaaatgaggcaagtcgggcttgaggcttgctgtttgcccagacactgctagttatcctcatcttaattgccactgaaaaagagaaaatgtggcaygagtcccataggatgcaccccaccacccttgaagccactgagacccaaygctgagcccgcagagctccttcccaygaggagaaatccgtggaagtcaaaatctctccragaaagcagtcagttttgacacggttttcattyagagaacctcttcccttttgcgagggaaaagtgctttaaaatgtcaaaacactccgatatatttatttatttggagcaaaatgacatttcactttgaaatgtcagttaatttccagctttgaaagtttttacaagatgcagcagtcgaactgatttcctgacagtatcgagaygttctcaatgagcccggctggaacacggagggaagtgcagggttggaagggaaacaaaaaa

SEQ ID NO: 93351 - DNA, 600 bp, Chicken  19866894411772_4
ctaatgcctgcatgcagtgcctcctcatgccccttggggcatgcagcaggaatgcaagctaaacccacacctatgtcccagcgctgctcctgggggttaaatgaggcaagtcgggcttgaggcttgctgtttgcccagacactgctagttatcctcatcttaattgccactgaaaaagagaaaatgtggcaygagtcccataggatgcaccccaccacccttgaagccactgagacccaaygctgagcccgcagagctccttcccaygaggagaaatccgtggaagtcaaaatctctccragaaagcagtcagttttgacacggttttcattyagagaacctcttcccttttgcgagggaaaagtgctttaaaatgtcaaaacactccgatatatttatttatttggagcaaaatgacatttcactttgaaatgtcagttaatttccagctttgaaagtttttacaagatgcagcagtcgaactgatttcctgacagtatcgagaygttctcaatgagcccggctggaacacggagggaagtgcagggttggaagggaaacaaaaaaccctctgctattccaagcctttaaaataacaat

SEQ ID NO: 93352 - DNA, 600 bp, Chicken  19866894411772_5
ttggggcatgcagcaggaatgcaagctaaacccacacctatgtcccagcgctgctcctgggggttaaatgaggcaagtcgggcttgaggcttgctgtttgcccagacactgctagttatcctcatcttaattgccactgaaaaagagaaaatgtggcaygagtcccataggatgcaccccaccacccttgaagccactgagacccaaygctgagcccgcagagctccttcccaygaggagaaatccgtggaagtcaaaatctctccragaaagcagtcagttttgacacggttttcattyagagaacctcttcccttttgcgagggaaaagtgctttaaaatgtcaaaacactccgatatatttatttatttggagcaaaatgacatttcactttgaaatgtcagttaatttccagctttgaaagtttttacaagatgcagcagtcgaactgatttcctgacagtatcgagaygttctcaatgagcccggctggaacacggagggaagtgcagggttggaagggaaacaaaaaaccctctgctattccaagcctttaaaataacaatagaggagaaaaaaaaaataatcatttggattct

SEQ ID NO: 93353 - DNA, 600 bp, Chicken  19866894411772_6
gcaccccaccacccttgaagccactgagacccaaygctgagcccgcagagctccttcccaygaggagaaatccgtggaagtcaaaatctctccragaaagcagtcagttttgacacggttttcattyagagaacctcttcccttttgcgagggaaaagtgctttaaaatgtcaaaacactccgatatatttatttatttggagcaaaatgacatttcactttgaaatgtcagttaatttccagctttgaaagtttttacaagatgcagcagtcgaactgatttcctgacagtatcgagaygttctcaatgagcccggctggaacacggagggaagtgcagggttggaagggaaacaaaaaaccctctgctattccaagcctttaaaataacaatagaggagaaaaaaaaaataatcatttggattctcagaaggcagaggagaaaattgcctgtttggctgtgctttaagccacattcggtgtttacaagttttacttgcagcaattaaactttctgaatggatttgggtgattgctagctgagaatagaaagcctactgctgcttctgggcttcttggtgctttcttaatccgagggag

SEQ ID NO: 93354 - DNA, 600 bp, Chicken  19866894411777_1
caatgtggctgtgagaacccattctgacaacaaattggatcatcagtctagtcctgagtttgcagtcggtcatctaaaatatggaattttctcttttgtgtatgagcaccgattctctgtatttcatccggtttgctcttttgcgttcagttgtggacagtctttgatgcttcagaagatggctgaagtcagttttcttctttctgtactaatatatattgtaaccttttgcttaacttagaaatcttactttgtcaacttcgcagcactgccgccatggaatttgtgtgagcagagaawtggagatgcgtccagtagatggagagtggggaccatggggaccttatagctcatgttcaagaacttgtggaggtggaatcaagagcaccaccaggctctgtaacagaccagagtatgttttttcttgttcttcttcattagaacacagtgaaggaattacgacataatggtttagttcaacatactatgaaggcattatggtttcatgaattcattcaaaacaccagtaaaataaatgtgttttagccatgtgtgaaaagagggatgagtctagagactccagtctgcttagaacttcta

SEQ ID NO: 93355 - DNA, 599 bp, Chicken  19866894411787_1
  misc_feature (1)..(139): n is any nucleotide
nnnnnnnnnnnnnnnnnnnnnnnnnnnnnnnnnnnnnnnnnnnnnnnnnnnnnnnnnnnnnnnnnnnnnnnnnnnnnnnnnnnnnnnnnnnnnnnnnnnnnnnnnnnnnnnnnnnnnnnnnnnnnnnnnnnnnnnnnnnagttttatgcttgtagcagttgtacgcacagctaggccttatattttatcttggatgcctggggcatcaaagggaaagatgggaacgtctgatggagaagaccctgtattttggcacattaatcatctcattgggagaatgggaacccttgctatggttgygttcagtgaaccaaaagcaatgctcgtgtggagtcactggttgctccaacacaggaatttggggttttggagaacaaccagataaatccttgggatattcttacggtcctstgctgacagaatgagccatggacatggtcacacgatctgaacggcagagaaaaaatgatgtgcagaaaatttccatatacgggggcaagatttgcactagaaggacactgtgctccatacaacagatggggaagatagcagcacccgcctgttagtgctcactgacacgttgagcgcgactcactgag

SEQ ID NO: 93356 - DNA, 599 bp, Chicken  19866894411787_2
  misc_feature (1)..(28): n is any nucleotide
nnnnnnnnnnnnnnnnnnnnnnnnnnnnagttttatgcttgtagcagttgtacgcacagctaggccttatattttatcttggatgcctggggcatcaaagggaaagatgggaacgtctgatggagaagaccctgtattttggcacattaatcatctcattgggagaatgggaacccttgctatggttgygttcagtgaaccaaaagcaatgctcgtgtggagtcactggttgctccaacacaggaatttggggttttggagaacaaccagataaatccttgggatattcttacggtcctstgctgacagaatgagccatggacatggtcacacgatctgaacggcagagaaaaaatgatgtgcagaaaatttccatatacgggggcaagatttgcactagaaggacactgtgctccatacaacagatggggaagatagcagcacccgcctgttagtgctcactgacacgttgagcgcgactcactgagactgcattacagcaaaactgccggcgcttgatccaacagaaaaccttgctctgataccaaagtgagacaaatagcttcattttccccaatgcagaacaagggagaccaccg

SEQ ID NO: 93357 - DNA, 600 bp, Chicken  19866894411787_3
atatacgggggcaagatttgcactagaaggacactgtgctccatacaacagatggggaagatagcagcacccgcctgttagtgctcactgacacgttgagcgcgactcactgagactgcattacagcaaaactgccggcgcttgatccaacagaaaaccttgctctgataccaaagtgagacaaatagcttcattttccccaatgcagaacaagggagaccaccgtgagcaaaagggattcacttgcatcactgtgaaaatatgaattttgttaccaaaacacttcccccaaagcatccracaccaatttggccatgccagctccaccaacctgccccaggctttgcctcccagtcttctgaagagtgaggatggctttgcgggccgggtagcccaaggcaatgacgggctcgatgaggtcacgctcctcctggctcagtgctgacagcaggtcggctgctgaatctggcttggccttgcgggatgccagtggccgtgccgggggcaggcaggagtaggggctgagggactgcaagacaagacagaagctcatgttggcctgtggggatggatggagccatcaccacagtgcccatgtgc

SEQ ID NO: 93358 - DNA, 600 bp, Chicken  19866894411794_1
gcagcacctgtctctctgaggcttcccatgtgcacccttaatcggttctctctcactccctctccatatgagctgccctcagctcactgctggagagagcaagggaactcgtagcatctctttcttgtttctcatctcccttacatgtgttttacttgtactgagctctcctcattggaatagagaattgaaaagtcctcgtgaacgaatcaggtcttaagcaagtttctttttaaaattctgcttaccagaccccatggtgtttcgtgctatttaagatgagggttgtagtaatttaakcgcaacatactcctcttaycaacttggtcaataactgagtgatacgaagggtcagggtttacaaactagtgaactctgctcttggatgctgttgttctcctacttgcttttcccattgaaaagtaattgctttgagcaccagaaatgattacagaagattacaccttttaaagcaatctcaggatctcgttcagaagaagaatacagtctgtacagtgttgtatggcttgcccagcaattactcactttgttgtagctaatttcagaaagcataaattgccttttatttctgaagagggc

SEQ ID NO: 93359 - DNA, 600 bp, Chicken  19866894411794_2
ggcttcccatgtgcacccttaatcggttctctctcactccctctccatatgagctgccctcagctcactgctggagagagcaagggaactcgtagcatctctttcttgtttctcatctcccttacatgtgttttacttgtactgagctctcctcattggaatagagaattgaaaagtcctcgtgaacgaatcaggtcttaagcaagtttctttttaaaattctgcttaccagaccccatggtgtttcgtgctatttaagatgagggttgtagtaatttaakcgcaacatactcctcttaycaacttggtcaataactgagtgatacgaagggtcagggtttacaaactagtgaactctgctcttggatgctgttgttctcctacttgcttttcccattgaaaagtaattgctttgagcaccagaaatgattacagaagattacaccttttaaagcaatctcaggatctcgttcagaagaagaatacagtctgtacagtgttgtatggcttgcccagcaattactcactttgttgtagctaatttcagaaagcataaattgccttttatttctgaagagggcttttttttttttttttctg

SEQ ID NO: 93360 - DNA, 599 bp, Chicken  19866894411806_1
  misc_feature (1)..(24): n is any nucleotide
nnnnnnnnnnnnnnnnnnnnnnnncaaggggaaatggtttcaaactaaaaagaggggagatttagattcaatataaagaaggaggttttttcagtaagggtggtgaggcagtggtatgggttgctcagagaggtggtgatgcccccatccctgcagacagccaaagtcaggctggaggggctctgagcacctggtggagctgtgggtgtccctgctcagtgcaggggagtcgggtcagatgacttccaaaaggtcccttccgcctcaaacgattctacgatgctatggttgcaaataacrcttaatatacagacaggcaaaggttgccttctgaaattagagagctggcggtataaatcactgcttccaatcatgtcctgcatctctggctgctcgcctggggtgttggaaatgagtgcctatgagctgggagaggcaggaggtggatgccgcagcagacgcctgctgttgtcctaggagatggtttccaaatctggaggcaggtttgctctgacctttaggaggcagcgctgatttgttttgttgctgcgctgtgttttctctttgtggtcccattaatcattttcattcaaatgaag

SEQ ID NO: 93361 - DNA, 600 bp, Chicken  19866894411807_1
tgtccttggcatccagacaattcttctattctcaggatgctttctgctgaacttcctgtctataaaaatgcgctaagggagtctatcactcttccagcctattccttccccttcccagagcttccccttctcttaccataccaagcaattattcttattaattattccagctaacagtaattatcagcagcatgcacccccagccacattaataacagcgatctctaggacactgaggaattggctgaaaagattcactttgctgcttggattgcacaggaagacaagttccttttcttytatttttttttcgggggtggggcacgacttcttgctttaagatgggctaaaggaggayggatgaagaaatgaagacttgctgtattaaggcttgtcaaagaagaattaaagaatggagttaatagaaatcgaaggtttaggctgtggattttatacagggtttctaagcaattgtattaattgattttttaggttctgatatttatgggccaaatactgaaatttctgcttgggctccaataatctgggatctgcctcagggttagggcttcaaattgttttcatttgctccacgagcac

SEQ ID NO: 93362 - DNA, 600 bp, Chicken  19866894411807_2
tctataaaaatgcgctaagggagtctatcactcttccagcctattccttccccttcccagagcttccccttctcttaccataccaagcaattattcttattaattattccagctaacagtaattatcagcagcatgcacccccagccacattaataacagcgatctctaggacactgaggaattggctgaaaagattcactttgctgcttggattgcacaggaagacaagttccttttcttytatttttttttcgggggtggggcacgacttcttgctttaagatgggctaaaggaggayggatgaagaaatgaagacttgctgtattaaggcttgtcaaagaagaattaaagaatggagttaatagaaatcgaaggtttaggctgtggattttatacagggtttctaagcaattgtattaattgattttttaggttctgatatttatgggccaaatactgaaatttctgcttgggctccaataatctgggatctgcctcagggttagggcttcaaattgttttcatttgctccacgagcacaagtgctgccattcagcagcaaatggaataaaatttggccatgtttcatcatctgtaa

SEQ ID NO: 93363 - DNA, 600 bp, Chicken  19866894411812_1
aattctattaaagaataatttccagaggatgtttttaactcagctattctgcatgtaactatgaggataagaaagatagtggctctgctggaagaaaaaaaaacctcccagagaatgatttattccacactcctcaaattccaaagtgaagtctctcttgcaaactgtagttagtaatctgaattgttctttggtgcactttcatttctctgacacaatttattggtagtataaaatgtagaaaaatgtttcactctgtacatatttttcaccccttttctcttgtcctctgaggacacygtttagatcctaagtcttcaaggcatttcctataccttattctccgtgcccagcacaatggtactccttaggcacaattgcaatgcaaataaataataatggtaagaacaaatcagtctcttctcagttgcacaccaacaccacacacacgaagtgtggcgaagtattcttgcttacagagccaagatctgaatttctggtcatggcaggtcattgtcaatagaaggggagagatgggttgggtttggattgggattgaaaggtcaagtccaagacttatccagcagaggtcaggctaaa

SEQ ID NO: 93364 - DNA, 600 bp, Chicken  19866894411818_1
catcttttccatgaggccagctggtgaaggcctgctgataaagactcagactgtctctttctctcctccggtttatttttaggtcgtttgatttattattcataattattgtgtattatctcacattccttttaacaaattagtttctcctatctcagttgttttttcctcttccttccactccctttctcctgaggggagggaagggtgtcatgtggttaatttttcaaactgcagtgactgacaagtaacttgatctaattgccaatacacaaatattttgtgattctgaaggcaggrtgggagagctggcctgacctctagttattagtctggtagcctggggcaaaaaaagggaaaaaaaagaaaagaggtctcatgtaataattatcatccctgtgtgaatacattggatagcatagggcatttcaaatagtagtactcatttaaactgagcaactgaactgagctcacagcttaaaaggaatcatgatgttgcaggcaggtatatttacattctgagtatcactgatgatgttaaaaagtctaggtcataccattcctgaagtgactgcagacccagattctgatatcctaatt

SEQ ID NO: 93365 - DNA, 599 bp, Chicken  19866894411824_1
  misc_feature (1)..(140): n is any nucleotide
nnnnnnnnnnnnnnnnnnnnnnnnnnnnnnnnnnnnnnnnnnnnnnnnnnnnnnnnnnnnnnnnnnnnnnnnnnnnnnnnnnnnnnnnnnnnnnnnnnnnnnnnnnnnnnnnnnnnnnnnnnnnnnnnnnnnnnnnnnnnttgattaattaaaagagaagccaacatccgagattttctcataaagaattttagccaattggcagctgctccagaggggaggagccagcctagcccagctgaggccacagccttcttgcagcagtctgtactgaccatcacatagagaaataattgagcygaagcgtctcatcacctaatgaaagcgcccagagccctctcctcattgcattgcatgggagycatcgtgcaataagaaagttctttagaagataactgtggagcacatccccagccgtgctgccacactgaagaccaatgttccaggcagcccaacctcagagcctgaacacctccagaaactttctctcctgtttaggatttgctgctgtggtttggctgggtgcamtggggctgctcagcaagctgtgacacagatgcttcccctttttccctaggcaagatatagcagaaaacaaa

SEQ ID NO: 93366 - DNA, 599 bp, Chicken  19866894411824_2
  misc_feature (1)..(78): n is any nucleotide
nnnnnnnnnnnnnnnnnnnnnnnnnnnnnnnnnnnnnnnnnnnnnnnnnnnnnnnnnnnnnnnnnnnnnnnnnnnnnnttgattaattaaaagagaagccaacatccgagattttctcataaagaattttagccaattggcagctgctccagaggggaggagccagcctagcccagctgaggccacagccttcttgcagcagtctgtactgaccatcacatagagaaataattgagcygaagcgtctcatcacctaatgaaagcgcccagagccctctcctcattgcattgcatgggagycatcgtgcaataagaaagttctttagaagataactgtggagcacatccccagccgtgctgccacactgaagaccaatgttccaggcagcccaacctcagagcctgaacacctccagaaactttctctcctgtttaggatttgctgctgtggtttggctgggtgcamtggggctgctcagcaagctgtgacacagatgcttcccctttttccctaggcaagatatagcagaaaacaaaaagaaagtttggttttaaccatcaagaaaagccacaatctgactttgctggtgtggtatttt

SEQ ID NO: 93367 - DNA, 600 bp, Chicken  19866894411824_3
cctagcccagctgaggccacagccttcttgcagcagtctgtactgaccatcacatagagaaataattgagcygaagcgtctcatcacctaatgaaagcgcccagagccctctcctcattgcattgcatgggagycatcgtgcaataagaaagttctttagaagataactgtggagcacatccccagccgtgctgccacactgaagaccaatgttccaggcagcccaacctcagagcctgaacacctccagaaactttctctcctgtttaggatttgctgctgtggtttggctgggtgcamtggggctgctcagcaagctgtgacacagatgcttcccctttttccctaggcaagatatagcagaaaacaaaaagaaagtttggttttaaccatcaagaaaagccacaatctgactttgctggtgtggtattttccactgcacagcaccacagagccaacagttcctttccacgtgcatttctcacactctctttcaagccctggcacatgtgtgccatggctgtggcctggcttcctgcagaagacaactcctcagcactgagccattgaggagatgagatgacagtgactgcaagcatt

SEQ ID NO: 93368 - DNA, 600 bp, Chicken  19866894411826_1
cagcagtattcaaaacagagcaggaattcttttgaaatgccgtcgagctgctctgcagcagttgggaagtttggcacatgaaaattgggcccaggagctgccaccagggctttttgtcccttaaaactcatctgtatgcagcgtcctgcattgcccagagcagccctgggctcagcatgtggctccaggctgcagaggggctgctggcctgtggggctgggggtcctcctcctgtaacagccacagatagctctgtgcttgtgtattacagaaaagaaggatctgttggtgcttgtggcygcgcatagaaaaaccaaccaacaaaccaaataggggtttggaatcgacttgtgatcagctggattatttatccataatcattaattgtacatcctgttgatgggctgacgtgtgcttgttggtattaggctcggttccatctgcagcgtcacatgaacatgagccagcagtgtgccagggtggccaaggagccagcggcatcctggcttgtgtcagaagtagtgcagtcagcagaaggtgatcgttgctstgcacctgcagtgctgtgttcggtgctggggcccctcgctgccagaaaca

SEQ ID NO: 93369 - DNA, 451 bp, Chicken  19866894411826_2
ctctgtgcttgtgtattacagaaaagaaggatctgttggtgcttgtggcygcgcatagaaaaaccaaccaacaaaccaaataggggtttggaatcgacttgtgatcagctggattatttatccataatcattaattgtacatcctgttgatgggctgacgtgtgcttgttggtattaggctcggttccatctgcagcgtcacatgaacatgagccagcagtgtgccagggtggccaaggagccagcggcatcctggcttgtgtcagaagtagtgcagtcagcagaaggtgatcgttgctstgcacctgcagtgctgtgttcggtgctggggcccctcgctgccagaaacacattggggccccaggtgtgtccagagatgggcaggagctgtgatgggtcggagcacagcgctgtgggatgggtcagcgtggagaagaggggctgaggggag

SEQ ID NO: 93370 - DNA, 600 bp, Chicken  19866894411828_1
aaatatatgtaaaacacaacaacaacaacagaacggattccgagcataatgagtctgccagcgcagtggtaacagtatcaaccacaagtttatgtgaagataactcagaaataagttaaatgcgggttgagagtctgcacctggcctcagggatgactgccattatttctgtggtttttcattcacattttcctaggtcctctcatgcctattttctcacactcacatgcagagcccacacaacaggggagctggctgactaatgggtgatagagaggaaactgtgacagtgagtaaagygctaggcagcaccaagtgcggggaaaaatgggtggagaagaagcgtctgagtcggagcaatcaaakaaattacagtaaatgtcaatgggtggaattgttcagaaaactgtaaccattgggcagttccttcccaagggcacatggatcaggagggcaggggaggtgcaaggggctcatacccagcttcttcttccatcttcccagggacggctttggaactcccaaatgtggctctggtgtaaccctgcagctcagcattaagctcgttgactcaagcagtcattggatgcagtgtggtgg

SEQ ID NO: 93371 - DNA, 600 bp, Chicken  19866894411828_2
tggtaacagtatcaaccacaagtttatgtgaagataactcagaaataagttaaatgcgggttgagagtctgcacctggcctcagggatgactgccattatttctgtggtttttcattcacattttcctaggtcctctcatgcctattttctcacactcacatgcagagcccacacaacaggggagctggctgactaatgggtgatagagaggaaactgtgacagtgagtaaagygctaggcagcaccaagtgcggggaaaaatgggtggagaagaagcgtctgagtcggagcaatcaaakaaattacagtaaatgtcaatgggtggaattgttcagaaaactgtaaccattgggcagttccttcccaagggcacatggatcaggagggcaggggaggtgcaaggggctcatacccagcttcttcttccatcttcccagggacggctttggaactcccaaatgtggctctggtgtaaccctgcagctcagcattaagctcgttgactcaagcagtcattggatgcagtgtggtggctgctgtgcacaaagtgtcatgcattgttagagcttgtgctctaactaatttgaaattgcatagac

SEQ ID NO: 93372 - DNA, 600 bp, Chicken  19866894411836_1
tatcagagaacatcatcaagaacatcacgatgtgttattccacaggaggcatttcccactgttactcttcaagactgcacatcatctactgtactgtcaagagtgactgtcaggtatagcaattaatgcacaaattaagctcttacaacaaagaaaactgggatcaggcaacagctgctctgagtaactctgttaggatcaacatagggcaaattttgaagtgatcagaagtggtgctaccctagttttgataacttaagaaaaataaaggattcagtggcttcttcgtttaagaaaaawtttacctaaataaggcagtttgtgagaggtgctcagggtttgaatccatcaacaacagtgctaatgacatgaaaggaaaggatgggcagaaagtgaacaatgtggtttcagatatatttctataagctgttgaatatttggaaacatttttattagatcagctactttttcaactggtgcttagaagaattaggatatcttttgtctgcttgtcttttcaaatgttttatttatttattcattttaaactatgcttcatgccaaatttaatgactaagaagtgctatagatagaagcaag

SEQ ID NO: 93373 - DNA, 600 bp, Chicken  19866894411837_1
aatatagctgtatttaactgagaaatattaaaaagaaaacaaaacaaaagcaaacaacagaagaaacaactaaaaacaacaaaaatacattcttttaactcaacatttctcctgatggtgtgcttctagcttggagctcttacacctttctgctgagaactggaactctgaactcatatgtcacatctaaaattagaaacgcaccttgcagcaggaaacaagcccgagttgttaatttgctggtgtcgttccaaggccagactactggtagaacggatggggttttagttgtcacttccwccaccaccattccttccactggatggcaatgttagaccagatacctgactaaatgggaggaaataataaaatgggaatctgttactccattgttggtagcagaggcacacatcttcttttgcttatacagaatttctaaatctgaagagaaggaaaatattacgttatgaaactgaacctgatgcacaatgttaccagtcacagactttgaggtaaagaaattaacatcctcactcttccatagctgatgctttgaatctatggcattgtattcatggattttacttgcaaacttattgt

SEQ ID NO: 93374 - DNA, 599 bp, Chicken  19866894411844_1
  misc_feature (1)..(134): n is any nucleotide
nnnnnnnnnnnnnnnnnnnnnnnnnnnnnnnnnnnnnnnnnnnnnnnnnnnnnnnnnnnnnnnnnnnnnnnnnnnnnnnnnnnnnnnnnnnnnnnnnnnnnnnnnnnnnnnnnnnnnnnnnnnnnnnnnnnnnngagctaagaggattcagaacgaaaggctctgacatgccaagtacggagatgttggtgcattttagattggtaaggtctgtttccagcactgcccctctgggatgagcgtcaggcagggcaagtcactaccgagacgtgaaataaaaggggacagattctctctttygcatcgcttctcatatattttgttgcaaaccattcatcttctctctttaaagtggtactgccttcatcatctgaaagatgtccgcctgcctgctggaatgctgctgctggatggctgtctggctgttgctgtgctgaccgtacggccctctccttgtcagagtgcagaagctgatgctgctgtggcagagcacggccgtcccgcttcaggcagtgattcagtgccacatccctgagtcggaattaatacgatccttttaatggcgtgaaatgggattatgtttttcacaatgaggttaa

SEQ ID NO: 93375 - DNA, 600 bp, Chicken  19866894411845_1
atgatggtgaccagagtaacagatgatgaaaaccttcttaaatcatttcttttgaaatataacatgcagtgataaaaacaatgtgggattctggtaatttacatggatatacctttcagacaatatgtgttaggtgcagcgctcctgtcccaaagtaattaattgtaatagagatccaactgtgaaagatttaggggatataaaagcaaatattctaaatgctggaggagtggtttcaacatctgacaattatgaaatcttcctgtggcccactgtcatgttcacccatacaaaaaaaamcctatcattcagacgtktttaaaagctaccgtgcttcttttctgcctggttgctaagtataaaaggagttttgttcttagatctgaaacaggtaaattagaaaagcatgtgtgtgagtgtgtgtaagaaagggaccatagataagaaaatttaagtcagcagttcaggcttgtgaaagccagtattacccagaaagaattactttaccrtactgtgacagagrgagagtcctgttctcttgctaccaccttgctgcccacagctctttttaacagagcacatttctttgtgaaggtgcct

SEQ ID NO: 93376 - DNA, 600 bp, Chicken  19866894411845_2
aacagatgatgaaaaccttcttaaatcatttcttttgaaatataacatgcagtgataaaaacaatgtgggattctggtaatttacatggatatacctttcagacaatatgtgttaggtgcagcgctcctgtcccaaagtaattaattgtaatagagatccaactgtgaaagatttaggggatataaaagcaaatattctaaatgctggaggagtggtttcaacatctgacaattatgaaatcttcctgtggcccactgtcatgttcacccatacaaaaaaaamcctatcattcagacgtktttaaaagctaccgtgcttcttttctgcctggttgctaagtataaaaggagttttgttcttagatctgaaacaggtaaattagaaaagcatgtgtgtgagtgtgtgtaagaaagggaccatagataagaaaatttaagtcagcagttcaggcttgtgaaagccagtattacccagaaagaattactttaccrtactgtgacagagrgagagtcctgttctcttgctaccaccttgctgcccacagctctttttaacagagcacatttctttgtgaaggtgccttgtgtggaatgatcgca

SEQ ID NO: 93377 - DNA, 576 bp, Chicken  19866894411845_3
atattctaaatgctggaggagtggtttcaacatctgacaattatgaaatcttcctgtggcccactgtcatgttcacccatacaaaaaaaamcctatcattcagacgtktttaaaagctaccgtgcttcttttctgcctggttgctaagtataaaaggagttttgttcttagatctgaaacaggtaaattagaaaagcatgtgtgtgagtgtgtgtaagaaagggaccatagataagaaaatttaagtcagcagttcaggcttgtgaaagccagtattacccagaaagaattactttaccrtactgtgacagagrgagagtcctgttctcttgctaccaccttgctgcccacagctctttttaacagagcacatttctttgtgaaggtgccttgtgtggaatgatcgcaatcgcagacactgtcaagcaggaggcagcccttgctgtgcacacgctgaaaaacatgggaatagatgtggtgctgataacgggcgacaacaggaaaactgcaaaagccattgctactcaggtaccttcgtgcattttagaaaatgtgtgatggctttctaaaattctg

SEQ ID NO: 93378 - DNA, 562 bp, Chicken  19866894411845_4
ggaggagtggtttcaacatctgacaattatgaaatcttcctgtggcccactgtcatgttcacccatacaaaaaaaamcctatcattcagacgtktttaaaagctaccgtgcttcttttctgcctggttgctaagtataaaaggagttttgttcttagatctgaaacaggtaaattagaaaagcatgtgtgtgagtgtgtgtaagaaagggaccatagataagaaaatttaagtcagcagttcaggcttgtgaaagccagtattacccagaaagaattactttaccrtactgtgacagagrgagagtcctgttctcttgctaccaccttgctgcccacagctctttttaacagagcacatttctttgtgaaggtgccttgtgtggaatgatcgcaatcgcagacactgtcaagcaggaggcagcccttgctgtgcacacgctgaaaaacatgggaatagatgtggtgctgataacgggcgacaacaggaaaactgcaaaagccattgctactcaggtaccttcgtgcattttagaaaatgtgtgatggctttctaaaattctg

SEQ ID NO: 93379 - DNA, 599 bp, Chicken  19866894411849_1
  misc_feature (1)..(93): n is any nucleotide
nnnnnnnnnnnnnnnnnnnnnnnnnnnnnnnnnnnnnnnnnnnnnnnnnnnnnnnnnnnnnnnnnnnnnnnnnnnnnnnnnnnnnnnnnnnnnaatgatctttccttgctccccaaatccagctcacccagaagcatttctcagtgcctccctgcttggtgtcagtgcaatgtttggagctgtctacttaccatgattcccactcaaaacattcctcattttcacagctgataactttttgtattcttaaaagcccggacgttgaaatactcagacccaaaaccccccaaggagctgcarttctgctctgctgagctccaagcacacagctatacccacctcagctcyccayctcctccrgttccacctcacctctctttggggaacctctcctggggcattttggtgctctccagctgtgctcttcyttctcgttttagttaatccccatcagtgttcgttgatgcttagcaatgcagccaggggtagcttttatttccgaagcacagcacgggaaaaacagtgtcccaaatccagagtgattcactgccacagaagaaagttcctcaaaacacattctcattcattcctttcaacaa

SEQ ID NO: 93380 - DNA, 599 bp, Chicken  19866894411849_2
  misc_feature (1)..(45): n is any nucleotide
nnnnnnnnnnnnnnnnnnnnnnnnnnnnnnnnnnnnnnnnnnnnnaatgatctttccttgctccccaaatccagctcacccagaagcatttctcagtgcctccctgcttggtgtcagtgcaatgtttggagctgtctacttaccatgattcccactcaaaacattcctcattttcacagctgataactttttgtattcttaaaagcccggacgttgaaatactcagacccaaaaccccccaaggagctgcarttctgctctgctgagctccaagcacacagctatacccacctcagctcyccayctcctccrgttccacctcacctctctttggggaacctctcctggggcattttggtgctctccagctgtgctcttcyttctcgttttagttaatccccatcagtgttcgttgatgcttagcaatgcagccaggggtagcttttatttccgaagcacagcacgggaaaaacagtgtcccaaatccagagtgattcactgccacagaagaaagttcctcaaaacacattctcattcattcctttcaacaaatttcctcccaacatttcccagacccatttctacacagcaaaagaggc

SEQ ID NO: 93381 - DNA, 599 bp, Chicken  19866894411849_3
  misc_feature (1)..(41): n is any nucleotide
nnnnnnnnnnnnnnnnnnnnnnnnnnnnnnnnnnnnnnnnnaatgatctttccttgctccccaaatccagctcacccagaagcatttctcagtgcctccctgcttggtgtcagtgcaatgtttggagctgtctacttaccatgattcccactcaaaacattcctcattttcacagctgataactttttgtattcttaaaagcccggacgttgaaatactcagacccaaaaccccccaaggagctgcarttctgctctgctgagctccaagcacacagctatacccacctcagctcyccayctcctccrgttccacctcacctctctttggggaacctctcctggggcattttggtgctctccagctgtgctcttcyttctcgttttagttaatccccatcagtgttcgttgatgcttagcaatgcagccaggggtagcttttatttccgaagcacagcacgggaaaaacagtgtcccaaatccagagtgattcactgccacagaagaaagttcctcaaaacacattctcattcattcctttcaacaaatttcctcccaacatttcccagacccatttctacacagcaaaagaggcagag

SEQ ID NO: 93382 - DNA, 599 bp, Chicken  19866894411849_4
  misc_feature (1)..(33): n is any nucleotide
nnnnnnnnnnnnnnnnnnnnnnnnnnnnnnnnnaatgatctttccttgctccccaaatccagctcacccagaagcatttctcagtgcctccctgcttggtgtcagtgcaatgtttggagctgtctacttaccatgattcccactcaaaacattcctcattttcacagctgataactttttgtattcttaaaagcccggacgttgaaatactcagacccaaaaccccccaaggagctgcarttctgctctgctgagctccaagcacacagctatacccacctcagctcyccayctcctccrgttccacctcacctctctttggggaacctctcctggggcattttggtgctctccagctgtgctcttcyttctcgttttagttaatccccatcagtgttcgttgatgcttagcaatgcagccaggggtagcttttatttccgaagcacagcacgggaaaaacagtgtcccaaatccagagtgattcactgccacagaagaaagttcctcaaaacacattctcattcattcctttcaacaaatttcctcccaacatttcccagacccatttctacacagcaaaagaggcagagaatgtaca

SEQ ID NO: 93383 - DNA, 600 bp, Chicken  19866894411849_5
cagaagcatttctcagtgcctccctgcttggtgtcagtgcaatgtttggagctgtctacttaccatgattcccactcaaaacattcctcattttcacagctgataactttttgtattcttaaaagcccggacgttgaaatactcagacccaaaaccccccaaggagctgcarttctgctctgctgagctccaagcacacagctatacccacctcagctcyccayctcctccrgttccacctcacctctctttggggaacctctcctggggcattttggtgctctccagctgtgctcttcyttctcgttttagttaatccccatcagtgttcgttgatgcttagcaatgcagccaggggtagcttttatttccgaagcacagcacgggaaaaacagtgtcccaaatccagagtgattcactgccacagaagaaagttcctcaaaacacattctcattcattcctttcaacaaatttcctcccaacatttcccagacccatttctacacagcaaaagaggcagagaatgtacacttgcacttaccaccagggacttgatttagccactcattttcttcccatttccaggatatcaacggatt

SEQ ID NO: 93384 - DNA, 599 bp, Chicken  19866894411852_1
  misc_feature (1)..(152): n is any nucleotide
nnnnnnnnnnnnnnnnnnnnnnnnnnnnnnnnnnnnnnnnnnnnnnnnnnnnnnnnnnnnnnnnnnnnnnnnnnnnnnnnnnnnnnnnnnnnnnnnnnnnnnnnnnnnnnnnnnnnnnnnnnnnnnnnnnnnnnnnnnnnnnnnnnnnnnnncatcactttgaaatatgaaagaaactctgtccttttcagcaggacgaactcaattaaacagaaaaaaaaaaaaaaaggaacagctgctttttcaaagagacagacgaccttatggtgtaattttcacactcagtcgatcaaagcttgkggtgtgattcattgaccatgagaatgaaactagacaagagacattgttgaaaggtcattccctcctattgatacaagaggcttaagtcaaatattacaggagtctcctttgagagattctggctgcacctccacctgcattaaaaaaaaaaaaaaagataaaagagaagataaaagagcgaatattgtgcaatggcatgaaacattatggtcaaactttaaggttttcccctgcctccatggtcagtgattcagtattcccacccccgagcttttactagagagattggacctggtcaa

SEQ ID NO: 93385 - DNA, 600 bp, Chicken  19866894411855_1
aaacagcatttgctcagcatttcctcctccactcaggcaaggctgttccctcctccctgtctggcacttaccgggcataggagtagtccaggctggcttgatcaatgcggttccgcaggatgccgatgtcagcagacaccatgtcatctaaagcttgtaactccttctgaatcctttttagcttcaccgtttcagcttgagttcttttggatctgcaaaaaggaaggtgttatttttctctttgcaagcctcttttcttgacacaatgggcttcattacatttgcaaggcaactaccgtytttaagagctactcagaaggctactcctttatggtttaagacctctgatcttacttaatatccacagggatctaaaatgtctgctattaaaggactacggcaaaattacgtaatgactataatgaaagtgcctaaaatggattgtgtttcttcactgaagaaacacacaagaagttgctgtatctaagtagctctcggcataaggaaacaggaaaaggcttggggggtgagtaagagggggaagggtatttagtcctacaaatatcccctttcaaagaagtccagctagaaggggccgaa

SEQ ID NO: 93386 - DNA, 600 bp, Chicken  19866894411858_1
gtagctcttttgcttgaggccggcagagtaagacgaagggcaaggtaaaatgtgaagatgcttttaaagcatttctgttccacaagggctgagctcagtgatgtgctgagtttccaggtgttcctccctcctccatgggaaggtgctgcccggatcagcgtgtgtgtagcggcacatactgaaatcatcaggctctgctttccatcatgttgtggccggctgtttgcatctgccagagaggtgtgtttgtcctcagcacacgcctggggctggctgcagtgtgtttgaagtccatgaccycygagagctgtcctacagccaccctgaactgaggagttacagggctggaggacagaaggacaacttcaggtgctgttttgtgagtgtagttcagcttgttttctaccagccaaaaaaccagattggacctctggttctgtaagtgttaccggtgttatcagttaggggagacgctgtctggatataaggaagaagtttctttgcaataatggtggtgaggcattggaacaggttgtccagatttctggtggatgcctcatccttgaagacggtcaagatgaggctggaggggctctgagc

SEQ ID NO: 93387 - DNA, 600 bp, Chicken  19866894411858_2
agctcttttgcttgaggccggcagagtaagacgaagggcaaggtaaaatgtgaagatgcttttaaagcatttctgttccacaagggctgagctcagtgatgtgctgagtttccaggtgttcctccctcctccatgggaaggtgctgcccggatcagcgtgtgtgtagcggcacatactgaaatcatcaggctctgctttccatcatgttgtggccggctgtttgcatctgccagagaggtgtgtttgtcctcagcacacgcctggggctggctgcagtgtgtttgaagtccatgaccycygagagctgtcctacagccaccctgaactgaggagttacagggctggaggacagaaggacaacttcaggtgctgttttgtgagtgtagttcagcttgttttctaccagccaaaaaaccagattggacctctggttctgtaagtgttaccggtgttatcagttaggggagacgctgtctggatataaggaagaagtttctttgcaataatggtggtgaggcattggaacaggttgtccagatttctggtggatgcctcatccttgaagacggtcaagatgaggctggaggggctctgagcac

SEQ ID NO: 93388 - DNA, 599 bp, Chicken  19866894411861_1
  misc_feature (1)..(38): n is any nucleotide
nnnnnnnnnnnnnnnnnnnnnnnnnnnnnnnnnnnnnnatctgttgaacaagacaataagcaacatggtaagaacctgatagggcagccagggacctttgtttgtttgaaatatcagccagttcccaaggcctcacaggttactgcgagtcctgagctgactccaccagttcttctctctgaaaatgtaaatcagggcaacagtttaacatttcaatgcaatttcctttacttggtaacacttagcatagaaagtagatggctggattcccacattgtccagtgtgggtcccacactgcrtttgaccccatgtgtctgcaattggaccacagtagctctgggctaccagtgtttacccagtcttccttctccctctgtctccagaattctctcagcaaataaacattaaaaataataataataatccaaccagccacagaaatctttccatctctcgatgagacagcccctcccacaggttcatgctcctatcctaacaccagttcagagcaggggaagggagatgctgctttctccaggcactgcaatgaacagagatcttacatgcactttaaatccctgctggtgggctctggaaa

SEQ ID NO: 93389 - DNA, 600 bp, Chicken  19866894411861_2
aaaaataataataataatccaaccagccacagaaatctttccatctctcgatgagacagcccctcccacaggttcatgctcctatcctaacaccagttcagagcaggggaagggagatgctgctttctccaggcactgcaatgaacagagatcttacatgcactttaaatccctgctggtgggctctggaaacaacctggctgatataaaacctggcaggctccatcctccattccacagctgcatttcaaaaacagaaaaggaggaacagctgagggagccaaccacaattcccagcaytcaaaatacactgaaatccaccttccagaaattagagggggattcagctgatcctgggacataaaaagttctctctagcaagagatggaacctactcagtgcctacaggaggctgagagcacagcatggatgctagcagagaaactgcttacattcagagctaattaacacagtgaaacagcatctgtgctttgaaaaatacccttggggaacaagaggttggccaaaggcacttggagctttggaaaaaaagaagaaaaaaaaaatcacaaaaccctccagccctggaattggctacat

SEQ ID NO: 93390 - DNA, 600 bp, Chicken  19866894411863_1
gtctcaaacagcttcatcatttctacatttatgcttcatcaactacctgtccaggaaacaattgaaaggtgtgtatcaaaagataggaatctatggatgggcagctttcatgctagccgtatgccagatgtcaccagtggtaaagtttgaacctagaagaagttcaagaacttcctactgaatctactaaagaaaaaatgcaaagactaaacacttagtagaatttcaaaaattccacttggagctttcttgcatgataagtgcctgtgaaatcaattggaaaaccagacaaatacacaygccagaagtttgtaaattccacccaaagagacacagcacaacatagctacacaagaggcccacgatgcgacaagaggttgtctagagataactgagaaatttataaacaagcacagcatcattaaagagggaagaaatactataaacagtagggtaatattgtaacttttgaaagtacaaaatagttgaaatactgaaggaacatatttagagggattttgggggtagaagagcatagttaggttttttaaacaatcataaatactctcagggttgtactgggatgaaacaagagtggca

SEQ ID NO: 93391 - DNA, 600 bp, Chicken  19866894411870_1
gtaggcattattaatgttattgtattgtgttctttgtctggtactaaacaattgctctaagtgaagtaattaagcaccatccaacatgtctgtgcatcaggtgagtgctctgtcagtctaattctgtgcgtgcagttggaaggaagggctcctatggcatacttagtttgtacatgctgtgagtatctgatgcaagctaaatgtggtctttcctcactatccctggagtatgaccaggagttctgctcagtatctctgccagcatccttcttctgctttccttccttcagtttcttcctycaaagatgaattttcatcagtgaacaggttgggtctgttctggaaggtggcctttacaaggctaatatgtttccctcccctattacacggcacccattttctcatagttatactttgaattttctccagattactgtggcacaacttgttcatgtttttgggttctgttgcaatagggaagtccctctagccacaactttcattaaatccagcttttctgtaggacaactgagaagatttttgcagggcactgttgagttggtgaagttgtcccagagcctccaccaaatgtcttctttt

SEQ ID NO: 93392 - DNA, 600 bp, Chicken  19866894411877_1
tctatataaattggcaaggatcaaaaattttggtgcctgacatagtcatctagaattcatgcattgtaataacatatatttatatttatagcttaatcatttttaatggttcctgtgcattacataacacacattagttctatactatttgccatgaggacatgaaatgccacaaaagaaactgttcataggaataagagtatgatattaaggtagctttttgaaataacagaaaactcacagtttcagttatgtgaggggcagatggctctgctttgggaaagtgagaaatacaatctyaggacagcattcagcagatgtctatgcagcagctccagctgacctgacaggtttgcacttcctccactccacacatatccaaaagcaggaacagtgcaagggcaaggaagtaaaccacaagcagtaatgctactgagcacagagaaacttatttaaagatataaaaccaaaacctaaatcatctaaatcaaataaaacaagcaaacaaccctctcccccaaataacaaagcaaagcaaaacaaaacccatcaagatcattctaccttggattttctttttctggggagaggaaggaaatg

SEQ ID NO: 93393 - DNA, 598 bp, Chicken  19866894411877_2
tttaaagatataaaaccaaaacctaaatcatctaaatcaaataaaacaagcaaacaaccctctcccccaaataacaaagcaaagcaaaacaaaacccatcaagatcattctaccttggattttctttttctggggagaggaaggaaatgttagaaaaatgaaacaggaacaattcacagatctgttatacttactccccatagtgcagcccaatggaatatatgactgatttagatttaaaaagattctgatcttctctttggaaaatgtctacattcctatagtgtatttacttgcacrtggctgaaactggctgttggaggagagacaaagtaaggttttgctctgagcagagtcccacattcatatggcagcgcagcttcaaagatggtttccaggtacattcagagctcttacagggcaaggcagtgccctataagatatgagacagtgatatgccctcagtgatacgagacactcttattaaaggtctggtgtcacatatgttgtggatgtattaaggaacagaagtagaggctgcagataagaaattgacagcacggtggaacaacaagtgttggaattactgacctcacca

SEQ ID NO: 93394 - DNA, 600 bp, Chicken  19866894411882_1
tgtttagcccttccctcatttaaatatcgagtgttttggaaaagatttgtacttagtggaaagccttgcaataacccacagtccacagctgggttgcttttcatttgctgaatgcagagccaacagctctgttctgaccgtggctcactgatctcagctccacctccagagctgctgcaacaccacactggcaatagcaaaaaccccagatagggccacagagcctgctttcacccaggggagctccctgcttctgcatccctctgacaggcacagcgaggcctgagaagtcaactataytctccacctctgcatccaaagatcctgacaccccttgaggtgccaggggaaacattacactgtcaatgtcacagatggaaagcagtgtayrcggatggcatgagcagagctaggaactgtgcttgtggtcttcaaaagcctcatctagcacactgcacaggagactctctgacctgcaaaaccacagggctctagagtacccatgacagcagcacgtacctgacttcagaggtgcaagcgtcaagaagagccaactaactgctcattctgtgcaagagaatctgcccttcttcatgcacc

SEQ ID NO: 93395 - DNA, 600 bp, Chicken  19866894411882_2
gggttgcttttcatttgctgaatgcagagccaacagctctgttctgaccgtggctcactgatctcagctccacctccagagctgctgcaacaccacactggcaatagcaaaaaccccagatagggccacagagcctgctttcacccaggggagctccctgcttctgcatccctctgacaggcacagcgaggcctgagaagtcaactataytctccacctctgcatccaaagatcctgacaccccttgaggtgccaggggaaacattacactgtcaatgtcacagatggaaagcagtgtayrcggatggcatgagcagagctaggaactgtgcttgtggtcttcaaaagcctcatctagcacactgcacaggagactctctgacctgcaaaaccacagggctctagagtacccatgacagcagcacgtacctgacttcagaggtgcaagcgtcaagaagagccaactaactgctcattctgtgcaagagaatctgcccttcttcatgcaccagaatccatcaatctctgtgactacaaaaccttgctctaagtgcattactggggggaaaaaatgaaccctacgccccgtcagcaccacag

SEQ ID NO: 93396 - DNA, 600 bp, Chicken  19866894411882_3
ggttgcttttcatttgctgaatgcagagccaacagctctgttctgaccgtggctcactgatctcagctccacctccagagctgctgcaacaccacactggcaatagcaaaaaccccagatagggccacagagcctgctttcacccaggggagctccctgcttctgcatccctctgacaggcacagcgaggcctgagaagtcaactataytctccacctctgcatccaaagatcctgacaccccttgaggtgccaggggaaacattacactgtcaatgtcacagatggaaagcagtgtayrcggatggcatgagcagagctaggaactgtgcttgtggtcttcaaaagcctcatctagcacactgcacaggagactctctgacctgcaaaaccacagggctctagagtacccatgacagcagcacgtacctgacttcagaggtgcaagcgtcaagaagagccaactaactgctcattctgtgcaagagaatctgcccttcttcatgcaccagaatccatcaatctctgtgactacaaaaccttgctctaagtgcattactggggggaaaaaatgaaccctacgccccgtcagcaccacagt

SEQ ID NO: 93397 - DNA, 600 bp, Chicken  19866894411884_1
agtgtgaggatttttctaaactctgatgttgcatggcaatgtttagtgctacctatgaccgagaaatattggtagtgactgttgctttaatatcacagcagtagtgtaaattagtgtaaataatagacatcaacaaagcactgctggtatacatttgagtcatcatatttttaagagttgcaatatgcttatcagcacaatctattattaacaaacacaactgataaaacatcctttactaaaaagttaatttcaactccacaatgaatgacttcaagtcactaaaagtggacacaaatwtggtttctacaagccctgcaggtgctgtgttttcaygatccttaaagagtagtttaattatttccttaagctggcacaaaaacatcctgaagaagcagctggaattgaatttcactgtgcctccagaggtgcaaccagattaaattctcctgtccatctgtcatagctctgcagttcctatgtgcccttgaagctatggtctagtaatacaattgtttcaattatcatataggaaaggagatgggaagattttagtacctggtaacgtttctttactatatttactttctctgcctctgt

SEQ ID NO: 93398 - DNA, 600 bp, Chicken  19866894411884_2
caatgtttagtgctacctatgaccgagaaatattggtagtgactgttgctttaatatcacagcagtagtgtaaattagtgtaaataatagacatcaacaaagcactgctggtatacatttgagtcatcatatttttaagagttgcaatatgcttatcagcacaatctattattaacaaacacaactgataaaacatcctttactaaaaagttaatttcaactccacaatgaatgacttcaagtcactaaaagtggacacaaatwtggtttctacaagccctgcaggtgctgtgttttcaygatccttaaagagtagtttaattatttccttaagctggcacaaaaacatcctgaagaagcagctggaattgaatttcactgtgcctccagaggtgcaaccagattaaattctcctgtccatctgtcatagctctgcagttcctatgtgcccttgaagctatggtctagtaatacaattgtttcaattatcatataggaaaggagatgggaagattttagtacctggtaacgtttctttactatatttactttctctgcctctgtacagtgaacactttaatcctctccaaattataattt

SEQ ID NO: 93399 - DNA, 600 bp, Chicken  19866894411889_1
gaaacatttctaatataaaggcagattaatctgtgtgtgtctgctgcagggtcctttactgactccaggaaatcaatgtgctaagtggatcatttttaacttagaaacagaagagcgagatgatgtcagtgtcttctggctgatccaaagaaaaactcatggttatttccagaaattaagatgggtatccaagtatgtcaacatctattcttttggtgcaggctacttctgttcctttgaagaaatgacattcaagagctgctctttgtggcttgatcaccagagagggccagagatggrcattatattaatgttgttccaccagcaagatgaaacagaattccttttttattgaatgtggtcattttccattggagaccagatgcattgtattgagctgtctaaagtctaagagaacagtgtcaaaatatccgtgaccacaataattttaacaaaagctttcaaatctgggtagattatttagatcagctttgcaacaaaagatgttaggcttcaaagacgttgcaccatgcagtgccccaggtaagagcacctacagtctttagtatcgtggctgtctgaacctcgttaccagtattg

SEQ ID NO: 93400 - DNA, 599 bp, Chicken  19866894411894_1
  misc_feature (1)..(166): n is any nucleotide
nnnnnnnnnnnnnnnnnnnnnnnnnnnnnnnnnnnnnnnnnnnnnnnnnnnnnnnnnnnnnnnnnnnnnnnnnnnnnnnnnnnnnnnnnnnnnnnnnnnnnnnnnnnnnnnnnnnnnnnnnnnnnnnnnnnnnnnnnnnnnnnnnnnnnnnnnnnnnnnnnnnnnncctgaacgatggtggattaagtgttcctggactcaaacttaaatgataagacctattttgagcattaagacacatgcatctgcagaggatgggagtgaggtaaagaaaatatacgcagcatgggtgttaaggaragacagacagtgtctgctttgctggttagtatttggtgccctcttctgcactcatgcatatttttaaagttctttacaaccagagaggagcatctgtctgtcgttcgcttatrcatagttgtgcttcgctgataggtgcaaggggtcrtcctagcagatgtcagccatcatggggatgggaaaagtagaatctcttttaggtgagaggaatgaatttgttaatactgttgagatgaagaggctgtgaatagaaattaaaaaatatttaactgagatttcttttatgacatctaaattat

SEQ ID NO: 93401 - DNA, 599 bp, Chicken  19866894411894_2
  misc_feature (1)..(53): n is any nucleotide
nnnnnnnnnnnnnnnnnnnnnnnnnnnnnnnnnnnnnnnnnnnnnnnnnnnnncctgaacgatggtggattaagtgttcctggactcaaacttaaatgataagacctattttgagcattaagacacatgcatctgcagaggatgggagtgaggtaaagaaaatatacgcagcatgggtgttaaggaragacagacagtgtctgctttgctggttagtatttggtgccctcttctgcactcatgcatatttttaaagttctttacaaccagagaggagcatctgtctgtcgttcgcttatrcatagttgtgcttcgctgataggtgcaaggggtcrtcctagcagatgtcagccatcatggggatgggaaaagtagaatctcttttaggtgagaggaatgaatttgttaatactgttgagatgaagaggctgtgaatagaaattaaaaaatatttaactgagatttcttttatgacatctaaattattatattaatagaagtaaatggtattttgattgtgactgaataagaaacataccatgtatatgcggtatataatcagtttaatcacatgctgaatacaggacaatctcatccca

SEQ ID NO: 93402 - DNA, 599 bp, Chicken  19866894411894_3
  misc_feature (1)..(18): n is any nucleotide
nnnnnnnnnnnnnnnnnncctgaacgatggtggattaagtgttcctggactcaaacttaaatgataagacctattttgagcattaagacacatgcatctgcagaggatgggagtgaggtaaagaaaatatacgcagcatgggtgttaaggaragacagacagtgtctgctttgctggttagtatttggtgccctcttctgcactcatgcatatttttaaagttctttacaaccagagaggagcatctgtctgtcgttcgcttatrcatagttgtgcttcgctgataggtgcaaggggtcrtcctagcagatgtcagccatcatggggatgggaaaagtagaatctcttttaggtgagaggaatgaatttgttaatactgttgagatgaagaggctgtgaatagaaattaaaaaatatttaactgagatttcttttatgacatctaaattattatattaatagaagtaaatggtattttgattgtgactgaataagaaacataccatgtatatgcggtatataatcagtttaatcacatgctgaatacaggacaatctcatcccaacatgttgtgaaattacaaataacatatagcgcac

SEQ ID NO: 93403 - DNA, 600 bp, Chicken  19866894411899_1
catttacagttcatccaggtctgtactgtgtctctttccatggaaaattccagtgcctctggcagctgcaagatagtttgggtccctgaggcaattctccccctgcccactgctggtcttttgtacaagatggcccaccaaatccaactgagcaaggaagcaagcaagctgggaagaatgtgctgtagcattaggaggggctcaaaatagaagggaagtcttcatgaagagcctcctttgaaaaattttggttatgggaaggttgaaaggaagcctctcctgctggggaaaatcctcatrggggctggccaaaagaagtcaagattttttttccattacagtcatgagggtgctgatttttttttttttttttttttgtaattgtgtgttagaacaaatcccagattattattatttttttaattatagaaaacaaaagagatcacatgacttagcctaagggtcaaggcagccttttgacttggggaaagtgcaagtctctgctcacatttttgccctcatgagcatttttgtgcacaaaacagcactgacaggagagctgcagcagctgcctatgcatccagaggtcttaaggacctg

SEQ ID NO: 93404 - DNA, 600 bp, Chicken  19866894411900_1
cagcccccggcggctttggcggggtgagcccgacgggctgctctctccgcgcagggcggcagcggagcgctgctacagcccaggtgcggccgcttcttcccattaacctcatcaagaagatgtgcgaatgtcagaaacccaccccaaatgttgattaccgaatgcgtttcctcggggtgggggaagaggaaaaaaaaaggccacgctcccctagggcaggaaggttcgcaacatgccagggctcggggttggttttaacgcacgtacaaacgagttgatttcgggtttctgggctccgargggagcggcagctccgcgcacagcgcatcaggtggagccgctccgccgccgcggacgcgcagtccccgcactccatccccgcaccgcatcgcccctctcctcgtcccgagacagaacggtgtgtccccccccggacccgcggccccactcctgtagttgggggttcggggggcggagggggggggaagaaaaaaggtgggaggaaaaagaaatcctcccgttttgtgctgggttttaaatatccccagctgtttcccaaacctctttccccaccgtaggtgctttgcccccccccgccgc

SEQ ID NO: 93405 - DNA, 600 bp, Chicken  19866894411900_2
tgggggaagaggaaaaaaaaaggccacgctcccctagggcaggaaggttcgcaacatgccagggctcggggttggttttaacgcacgtacaaacgagttgatttcgggtttctgggctccgargggagcggcagctccgcgcacagcgcatcaggtggagccgctccgccgccgcggacgcgcagtccccgcactccatccccgcaccgcatcgcccctctcctcgtcccgagacagaacggtgtgtccccccccggacccgcggccccactcctgtagttgggggttcggggggcggarggggggggaagaaaaaaggtgggaggaaaaagaaatcctcccgttttgtgctgggttttaaatatccccagctgtttcccaaacctctttccccaccgtaggtgctttgcccccccccgccgccgccctccccttctcgtttctcttttttaatatcgcagctatccctcctttttaacatttaagaggaaacaagtttaatattcatggctgttaatagagaagggccattatcgccgccccattgttccgagccccgcacaatgccgcttgtattttcatgtgtatattcccaaagtt

SEQ ID NO: 93406 - DNA, 600 bp, Chicken  19866894411904_1
cttccaaactgcagtatgacagctaattctgtcactgcagaacactggagcagtgtattttactagagaatgagagaccacctctgctgtgcagaggcacaaactggcagcccaagtaggggatctgggaaggtgctaaatgtgacctgactgcagtttatgctaccttcaaaaaagagattcctgactattgaaagctcttgctagtggatgggaaaattcactgagatccagtggctgcaagatgaagtaaaaactagtccaagaatatcttcttttgctctttttctcttcccagcrctgagaatagttagctgttgaaacaagttatgtatagatgagatggatttgccattgcttcatgtgcttcccttgaaagtgactgtcttcctcaaagctgtggactgttgcaaaaaggtgtgttcttggtgcaggtgttacttggggaaaggtgttaaactgatgtaaagagtaaagcacttctgaaaagcatggagggttgtgctatcttcggtccatttcagagatcctttagatccttaactttcccacattgtctttcatctcaagcaaaattctcttgctttggcaataaaagtc

SEQ ID NO: 93407 - DNA, 600 bp, Chicken  19866894411906_1
tctgccatttgatgcagcccataaagacaaatgactatctcttgtttcagatgctcatagtctccaggacatattatgtacccatgcactgggaaggaggagggtaaagcaaaccttctggcctttcttttagtgaaggccgatgccttgctgttcccaggttcaagaacctttactagctgcagtgcttcggtgcaaagtgcaggactaaatgtggccttgcacttagcttgctcagtggtcactgctttgttagattgactagcagagcttctgttgatgctgggaaagaaaggtgcrtgtaaagctctgaaagctgactctgtgtgtgtgatgtaatggggaggcatgtcactgcctgacatgataatggggccaacaggtcactttcatttcgtcctctgagttggaggctgaggaccaacggttactttgccagatggaaatgagaatacacctatgctataataaacatgctatttcctctctggaggcatgagaggccttgcagagggatctagattagagcagtggacaatcagcggtggcataaagctcagtaaaggtgagtgctgggtgctgtacctggggtgggataat

SEQ ID NO: 93408 - DNA, 599 bp, Chicken  19866894411908_1
  misc_feature (1)..(20): n is any nucleotide
nnnnnnnnnnnnnnnnnnnnatttgttctgagaacttccgcaaccaatatagaaatccattaaatctttataacaggttaacctcaactagtaattactcattaatcttgaagaaaatgtgtatttccatcagcccattgccaagtcagaagcctaagataaaaaagggaagtatttaatctgttttgtaaagtttgttaatgacaaattctgtctgacagattagaaaatcaggttcactgtgttagggtgcattcagttttaaaaagtgattaactgtatgccaagctgtcaaagaarttttgcatgaaaaaagaaaacttgttaacattatgtctaagccctgtgatttcataaggcacattttaaatatacatgaaaaaaaaatcagctgtatatgaccactttcaaaaattgaagtattgaaactatcaaaatagagaattcaatgagtttttttgttwttccctcattcccttctcttattcttttcccartatctttgactttaaaaacacttctatttttcctctagaattttagttgtgcttgcatcttcttggtaattcaactgaacatagaatttgtccttcctgaaa

SEQ ID NO: 93409 - DNA, 548 bp, Chicken  19866894411908_2
aagggaagtatttaatctgttttgtaaagtttgttaatgacaaattctgtctgacagattagaaaatcaggttcactgtgttagggtgcattcagttttaaaaagtgattaactgtatgccaagctgtcaaagaarttttgcatgaaaaaagaaaacttgttaacattatgtctaagccctgtgatttcataaggcacattttaaatatacatgaaaaaaaaatcagctgtatatgaccactttcaaaaattgaagtattgaaactatcaaaatagagaattcaatgagtttttttgttwttccctcattcccttctcttattcttttcccartatctttgactttaaaaacacttctatttttcctctagaattttagttgtgcttgcatcttcttggtaattcaactgaacatagaatttgtccttcctgaaaagctcctctgtgctcttaccttcccatcaaaccacagctacatcctgggagactctttttcagagcagcagtagtttctgaggtaggccagagcttaggatgatttagaattc

SEQ ID NO: 93410 - DNA, 515 bp, Chicken  19866894411908_3
ttaatgacaaattctgtctgacagattagaaaatcaggttcactgtgttagggtgcattcagttttaaaaagtgattaactgtatgccaagctgtcaaagaarttttgcatgaaaaaagaaaacttgttaacattatgtctaagccctgtgatttcataaggcacattttaaatatacatgaaaaaaaaatcagctgtatatgaccactttcaaaaattgaagtattgaaactatcaaaatagagaattcaatgagtttttttgttwttccctcattcccttctcttattcttttcccartatctttgactttaaaaacacttctatttttcctctagaattttagttgtgcttgcatcttcttggtaattcaactgaacatagaatttgtccttcctgaaaagctcctctgtgctcttaccttcccatcaaaccacagctacatcctgggagactctttttcagagcagcagtagtttctgaggtaggccagagcttaggatgatttagaattc

SEQ ID NO: 93411 - DNA, 599 bp, Chicken  19866894411910_1
  misc_feature (1)..(116): n is any nucleotide
nnnnnnnnnnnnnnnnnnnnnnnnnnnnnnnnnnnnnnnnnnnnnnnnnnnnnnnnnnnnnnnnnnnnnnnnnnnnnnnnnnnnnnnnnnnnnnnnnnnnnnnnnnnnnnnnnnnnttaatgaaaaaaatggatgataactagtacacttagcctttatgcataattgaccaaaaatggctcagaaaaaaatatagtagtgtccaaactagaactgattattaacggtctgcttcccttgttacagcctctctgccccagcctactgataatacagaacccacaccttaatcttggtttktaggaggaaagaaagtgttttccatgttttttgctcttatttttagcaacctgccattctggttaagtrggttttgtaaaagggattttagatgatttatgttctgatgctattgttttgcttcatagcagaagcagctttgttaatgcatgaatttgaactatagaagaccattcagccagacttgaagcaacatttgaaatgtgcttaaaattagaaattgtagcctggatgtgtttcagaaatggaaaagtgatttgaggtggggctcttgacactacatgattatcttgtgcttg

SEQ ID NO: 93412 - DNA, 599 bp, Chicken  19866894411910_2
  misc_feature (1)..(47): n is any nucleotide
nnnnnnnnnnnnnnnnnnnnnnnnnnnnnnnnnnnnnnnnnnnnnnnttaatgaaaaaaatggatgataactagtacacttagcctttatgcataattgaccaaaaatggctcagaaaaaaatatagtagtgtccaaactagaactgattattaacggtctgcttcccttgttacagcctctctgccccagcctactgataatacagaacccacaccttaatcttggtttktaggaggaaagaaagtgttttccatgttttttgctcttatttttagcaacctgccattctggttaagtrggttttgtaaaagggattttagatgatttatgttctgatgctattgttttgcttcatagcagaagcagctttgttaatgcatgaatttgaactatagaagaccattcagccagacttgaagcaacatttgaaatgtgcttaaaattagaaattgtagcctggatgtgtttcagaaatggaaaagtgatttgaggtggggctcttgacactacatgattatcttgtgcttgtgcgtgcaccaagatgttgtgtgacatacacagccattttacaaacagttttttatttcactgagtttt

SEQ ID NO: 93413 - DNA, 600 bp, Chicken  19866894411910_3
tttgaggtggggctcttgacactacatgattatcttgtgcttgtgcgtgcaccaagatgttgtgtgacatacacagccattttacaaacagttttttatttcactgagttttgtttgatcatctgcacgaggatttaaattgcatctttttatgtaactggaaacatatgagctttgctgcaacttaatgaacaagcagaagctttttgggagaactgttttaatgattaaaaattaatgtaagcttttattattggagatgctcataatttcagagtgtatgtatgtgacaaaggtagkttttgctttggggaatatgtcattaatttgttggttctataaaaaagcaaaatcataaaaggcttttgagtgcctgggaattcttaaatgtttttttatgtataatgtttctagtaacatctgcttttaaatagtaaattaatatagcagtaacaagaaggtatttatgctgcatacagtgtgcgtacagggattgtacaattactctgttctcaaattttcataaattctgtcactcttgatgcagaagtgaacgcaacctcagactaattttcactggctcttacgtgttctgaaggc

SEQ ID NO: 93414 - DNA, 600 bp, Chicken  19866894411912_1
tgtggagggtatttggctcattctcctctaatttgattctctagggatgtgttggcatgtctttattttagtttattgatacttcacagtttgcacttcatgaaactgtcaaatgcttaggttgatagtatgtccctttttgtttttggatttaaaatccatgaagtactgcatgtgcctactggatacattaaaaggaattttaaatggagactgactgaacaaatggtttttgctgacatttaaaagcataaaaacatttctgttcttaacaaaccaagataaaacttcagagccctmcttctcagcttgggtgttctaagtgtacttatctgtgttcacttaccatttgcaggtttctttgttgttttcttgttttcagtcaggctttctgtttttatactagtgtaggccttctacactggagttaaggttggagtaggattgattacttaactaaggaaacctaagtaaaacttatttgtagacttaaatttaacgataaagtaacaaaagttatggtttccttttaataaaaattatctggcttcaattcaaactaagaaatatttcattcctatatcgttggtagtgacagaa

SEQ ID NO: 93415 - DNA, 599 bp, Chicken  19866894411913_1
  misc_feature (1)..(23): n is any nucleotide
nnnnnnnnnnnnnnnnnnnnnnntttgagatttgttgactttaccactcactgaccggttgtttaggaaagctctggcacacttatcttgtacagaacactaacaatttcatctatcaccactctgaataaagtatttgattaacccacctgaagcggtgtttattagctgacagtcatcaatacgtgagctaattaaacactcaccacagtgcattagtcaacagattagaattttctttgttttgatttaaacttatgtgtctttgttacaaccaccttagtaattacatctaatccyggatttctttaatttgacagatatttttccattaatttctacaggacaaacgtcaggatctctatgagaaccattttacataatatcatatgggagaaaatcaggtctctataagattccagttttgatgcaactttagtttctggctttagcacttctctccattctcccttctccactgaatacccgtacataagttatttggtccagttctaacagagaaggtggtctcatgttagtttgatgggcggatatatacctacagaagaaaatggagttgttacagagcaaacagtagg

SEQ ID NO: 93416 - DNA, 600 bp, Chicken  19866894411913_2
gatttctttaatttgacagatatttttccattaatttctacaggacaaacgtcaggatctctatgagaaccattttacataatatcatatgggagaaaatcaggtctctataagattccagttttgatgcaactttagtttctggctttagcacttctctccattctcccttctccactgaatacccgtacataagttatttggtccagttctaacagagaaggtggtctcatgttagtttgatgggcggatatatacctacagaagaaaatggagttgttacagagcaaacagtagggyagaaatgcagattagtacaaaacaaaatgcttcaaatgttgccattatttgttcccaaagtcttgttttagctacaacattttcactgacaaaagcctttcttaagttctcttgagcaagtctgtaaaataaagagtttctaaatagtatcatggatcaaaatctatttatttttaaacaagtcttaattcagacctctgcaaattcggaatagaattagcctttagattattttaaaagtaaaaagaacaatatatttgcctgggctgacttcagtagaaaccctgggaataggacctg

SEQ ID NO: 93417 - DNA, 600 bp, Chicken  19866894411913_3
caaggcctaggatgtgaatgcactgtaatgcacctctgactctcctcagctaaatgttatgagttaaataccaagatttggtctagttgtagacagaatatttatttggcttgtgggtggaacactccttttatttacttgtgattgttcgtaggactgtatatatttgacgaacgaaacgattgtgtaaagagtgatagatggatatttgaaaggctgtcagagatccttcccactattctttccacatagcaacaaaacaagctcagtttatgacttttatttaagagtatctaaggracagattttgtaataaargtcttctgtcctgttgatgacaagtataatagccttttttaaacctcaaatcacatatttaaactacagctatagggcattaaatgcctgtgacctaaggcagctgcacattaaaaaagaaaaaagtgggaaagaagggaaaggaagaaacagccctaaagaactctggaatgaagcactgcccccatttttgaccagaggcactccacagaggcaaatgtgcttggttcatgatgcttccaaacgcctggggctgtgtaagggacagggattgtcagtggc

SEQ ID NO: 93418 - DNA, 600 bp, Chicken  19866894411913_4
tgcactgtaatgcacctctgactctcctcagctaaatgttatgagttaaataccaagatttggtctagttgtagacagaatatttatttggcttgtgggtggaacactccttttatttacttgtgattgttcgtaggactgtatatatttgacgaacgaaacgattgtgtaaagagtgatagatggatatttgaaaggctgtcagagatccttcccactattctttccacatagcaacaaaacaagctcagtttatgacttttatttaagagtatctaaggracagattttgtaataaargtcttctgtcctgttgatgacaagtataatagccttttttaaacctcaaatcacatatttaaactacagctatagggcattaaatgcctgtgacctaaggcagctgcacattaaaaaagaaaaaagtgggaaagaagggaaaggaagaaacagccctaaagaactctggaatgaagcactgcccccatttttgaccagaggcactccacagaggcaaatgtgcttggttcatgatgcttccaaacgcctggggctgtgtaagggacagggattgtcagtggctcatggactgtcacgtct

SEQ ID NO: 93419 - DNA, 599 bp, Chicken  19866894411917_1
  misc_feature (1)..(32): n is any nucleotide
nnnnnnnnnnnnnnnnnnnnnnnnnnnnnnnncattctgaaagcccaaatataaaccaggttttctccaaaacaggtactcttttctgtttaggccagctgaatagtatgatctcgtatccatgacctgtgggaagcatctgtgcctgctcatatattgaggcaaaaagagaagcagcgtggaaattgcgacttgctgtgagaaataaaacaattccgagtaaatgaatattcaaaagcatgtgtaaatcacctttcagcactgtgtttcttgactgaaaatgttacttgtgcacgtatrctactaggagtgagaaaatagcatttaattgcatgaagtagcagaccagactgaaaagagacccttgcacaactgcagtggttacttgaaacttgtacttttattgaaagaaaaataaaatatgttaaggctgttgctgtctgggaacttctgcaggcttttgagttagaggtaatgtggtgcacagaactagtgtgcgctgcagattgcttactgaaaaaataggatagatgtttactgatggcccggagtgcgcatctgctgtaggcttgatagcaaatgttatttagaattagcaa

SEQ ID NO: 93420 - DNA, 600 bp, Chicken  19866894411923_1
aaatttaaatgaggagggaatgctgaataataactgtacacagcaaaattttctaataataatgtagacattaaagtaatcaatgaaagaaatcaggctctatttagccttacccacttccctaacaaacctggtctaaccatacaaatacatcattttgttttgcttctattgtgtatatgctagaaagataaaacatcatctaacaaattctacacattcatattttcatgtgcattataaattcctactttttacgtgttgcatgcttaaagctcactgaactatctacactggaarcaagcagtactatcaggcaaattacttcaattttagcagatttttgtcttttacagacattgtagaggcaggttgaggtttttcttcttcacagtatccttcttttagaaagaattcaaaagccatgctaattctgtaatgttctctccacattctcctttttgttgtaaggacatttggtgctgtgttactgtaggttctagctgataactttaaacgcttattaatcctttcttagctcctatttcaccatgttgttttcataaatttactgcactaacatactctttcccctaaata

SEQ ID NO: 93421 - DNA, 599 bp, Chicken  19866894411925_1
  misc_feature (1)..(165): n is any nucleotide
nnnnnnnnnnnnnnnnnnnnnnnnnnnnnnnnnnnnnnnnnnnnnnnnnnnnnnnnnnnnnnnnnnnnnnnnnnnnnnnnnnnnnnnnnnnnnnnnnnnnnnnnnnnnnnnnnnnnnnnnnnnnnnnnnnnnnnnnnnnnnnnnnnnnnnnnnnnnnnnnnnnnnaatctcctattagaaaataccttggggataacacagttagtggtgggagaccaccactaaccaaatcggaatattgacaatataccagcaacaaagactgtgttctcataaaatgctgtcttctgttgggtgcaygtaggattcctgctgtgtgtgtagggaaggggtcagacctgtggaggtggcagctgcctgcagtgctgtcctcaaaccacagtgctttgggaaagggctggcagggctcccctgtgctgctccatcgcaggcagttttgtttttgtcgtttaaagtgaatgatggatgagcttcctgcatgacttttgaagggtctgacaaatatgacggggttgctttcatttctcgctttatatttctgacaaacgaagggaagatgaataatgtgaagtgccttcctttacatttgcgagacttat

SEQ ID NO: 93422 - DNA, 599 bp, Chicken  19866894411942_1
  misc_feature (1)..(50): n is any nucleotide
nnnnnnnnnnnnnnnnnnnnnnnnnnnnnnnnnnnnnnnnnnnnnnnnnncaagtgattgcttaaacattattgtttcagaagttttcaatagctccctagactcttgatcttagctgttctggaagtagacaccttcccaatccatctggttcatttcagatccaaggttacattttctttcagaaaatgccttctggcagcctaggctctgaagatagcaaatttcaacattgtttaggccaccactgtctaccttatcagaccactataaagtcatttattttatgaactctttggragaaactgtctgcatctttgtgctgtgtttgtatagcatacagtagcatctcaggctagactaaggatttctaggggaaacagaaataataaaaggaaagaattcaagcgggacaatttgctaggaagrtttgcagaggagtaattatacacttgtggtaacaaagcagtagaggaggaagagttgcaatggaaggtactgtgcttcaccccrgctgctaaaaytattcctgggtagctcatgaaaaatggcattgagagcataacctagctcacaaaaaagctgccagcagactgcta

SEQ ID NO: 93423 - DNA, 600 bp, Chicken  19866894411942_2
gacaccttcccaatccatctggttcatttcagatccaaggttacattttctttcagaaaatgccttctggcagcctaggctctgaagatagcaaatttcaacattgtttaggccaccactgtctaccttatcagaccactataaagtcatttattttatgaactctttggragaaactgtctgcatctttgtgctgtgtttgtatagcatacagtagcatctcaggctagactaaggatttctaggggaaacagaaataataaaaggaaagaattcaagcgggacaatttgctaggaagrtttgcagaggagtaattatacacttgtggtaacaaagcagtagaggaggaagagttgcaatggaaggtactgtgcttcaccccrgctgctaaaaytattcctgggtagctcatgaaaaatggcattgagagcataacctagctcacaaaaaagctgccagcagactgctagtcaaattatattccaaaacctctgattctrttactcattacagtatttatatactctcctcacaaattataaaacagtgtcattaaagataaatcatgtaagtctacagccactcttttctctgctact

SEQ ID NO: 93424 - DNA, 600 bp, Chicken  19866894411942_3
aagatagcaaatttcaacattgtttaggccaccactgtctaccttatcagaccactataaagtcatttattttatgaactctttggragaaactgtctgcatctttgtgctgtgtttgtatagcatacagtagcatctcaggctagactaaggatttctaggggaaacagaaataataaaaggaaagaattcaagcgggacaatttgctaggaagrtttgcagaggagtaattatacacttgtggtaacaaagcagtagaggaggaagagttgcaatggaaggtactgtgcttcaccccrgctgctaaaaytattcctgggtagctcatgaaaaatggcattgagagcataacctagctcacaaaaaagctgccagcagactgctagtcaaattatattccaaaacctctgattctrttactcattacagtatttatatactctcctcacaaattataaaacagtgtcattaaagataaatcatgtaagtctacagccactcttttctctgctacttccattgcatttgtcagctttcaaaagtgtattgatttctgactctagtaacaataatttttctaacatttttcattttctgtt

SEQ ID NO: 93425 - DNA, 600 bp, Chicken  19866894411942_4
tttcaacattgtttaggccaccactgtctaccttatcagaccactataaagtcatttattttatgaactctttggragaaactgtctgcatctttgtgctgtgtttgtatagcatacagtagcatctcaggctagactaaggatttctaggggaaacagaaataataaaaggaaagaattcaagcgggacaatttgctaggaagrtttgcagaggagtaattatacacttgtggtaacaaagcagtagaggaggaagagttgcaatggaaggtactgtgcttcaccccrgctgctaaaaytattcctgggtagctcatgaaaaatggcattgagagcataacctagctcacaaaaaagctgccagcagactgctagtcaaattatattccaaaacctctgattctrttactcattacagtatttatatactctcctcacaaattataaaacagtgtcattaaagataaatcatgtaagtctacagccactcttttctctgctacttccattgcatttgtcagctttcaaaagtgtattgatttctgactctagtaacaataatttttctaacatttttcattttctgttacctttgaaat

SEQ ID NO: 93426 - DNA, 600 bp, Chicken  19866894411942_5
gtatagcatacagtagcatctcaggctagactaaggatttctaggggaaacagaaataataaaaggaaagaattcaagcgggacaatttgctaggaagrtttgcagaggagtaattatacacttgtggtaacaaagcagtagaggaggaagagttgcaatggaaggtactgtgcttcaccccrgctgctaaaaytattcctgggtagctcatgaaaaatggcattgagagcataacctagctcacaaaaaagctgccagcagactgctagtcaaattatattccaaaacctctgattctrttactcattacagtatttatatactctcctcacaaattataaaacagtgtcattaaagataaatcatgtaagtctacagccactcttttctctgctacttccattgcatttgtcagctttcaaaagtgtattgatttctgactctagtaacaataatttttctaacatttttcattttctgttacctttgaaattgtctttcttaagtcagtgcaattcttaattttttacacaccttcaagttccctaaaatgtgtcttatctaagacacaagtaaggtgcagccctgcaagcatggca

SEQ ID NO: 93427 - DNA, 600 bp, Chicken  19866894411948_1
ttgcagcagtaggtttttaataactactattttgtactttcatgtcatacatactgcagtgttctatagatgcaaattactgattttaggaaacgtttaaacctgaggaatgggctttctgaaaaacatcctttttgtagtttaaatgtgtgtcctgcatattttatcacctgaaatgagaagtaagattattgctttacatcctctcaactgcttgcgaagtctgtaactgttttgcatcaatactgttattgcagtgcttacagtacttaagaggaaagttgaaagaagtgagggatktaacaaaacaacatcaaaataactgtaaaaaatatttatatattcttcagattaaccaatacatagtttaactgttctctgggatgatggagttttatacaacrtagaagaatttgtcacacaactatcttaatcctttaacaagactacattctattactgtctctaggtaatatttgaacatcttttttgtgtctttgatcattaactaaaaaaaaaaagttaatcagaacttttaaaagactagctgcacctgggatgggaaactgggagatgataagctcagaagagctaccatct

SEQ ID NO: 93428 - DNA, 600 bp, Chicken  19866894411948_2
gaggaatgggctttctgaaaaacatcctttttgtagtttaaatgtgtgtcctgcatattttatcacctgaaatgagaagtaagattattgctttacatcctctcaactgcttgcgaagtctgtaactgttttgcatcaatactgttattgcagtgcttacagtacttaagaggaaagttgaaagaagtgagggatktaacaaaacaacatcaaaataactgtaaaaaatatttatatattcttcagattaaccaatacatagtttaactgttctctgggatgatggagttttatacaacrtagaagaatttgtcacacaactatcttaatcctttaacaagactacattctattactgtctctaggtaatatttgaacatcttttttgtgtctttgatcattaactaaaaaaaaaaagttaatcagaacttttaaaagactagctgcacctgggatgggaaactgggagatgataagctcagaagagctaccatctcttacagtttggaaggaatgtttagaacttttttacagaggtcagttcttccttcagattgcaatagaaatctctcactaaggactggcttttttaatggaacg

SEQ ID NO: 93429 - DNA, 600 bp, Chicken  19866894411949_1
gaatccctggatatttcatatgacaaacaatataaccatactttttcacatgctgacacttaagggtctttttatctccaagagcttttagaaaactctgaactgacatcatcatatgaacagttcagtagatgaagggcagactctagacaggaacaccagagcatatattgcttctcagatgaagaatattcctcattttccatggaggtgatcaatgctgggctggatggagctctgggcaacgtgattgctgggtggcaaccctgcccaaggcataggggctggagctcaatgatmtttaaggtcctttccaacccamrccattctatgattctatggttctgatttccagtagaggatacagacccttggctttcagtgtatcctctgaaatccttcccttataggaactacatttatctccccaagaataggagagcygattcttcaaggaactatacrtatttacacgrgatcatctttgatggctcaaaacctgtgttcaggtgtttaatcatcatccaaagattctcttagaagaaggcaggcacagctacccaagaacaggtatgtacctaaactgaagctgttttagca

SEQ ID NO: 93430 - DNA, 600 bp, Chicken  19866894411949_2
acaaacaatataaccatactttttcacatgctgacacttaagggtctttttatctccaagagcttttagaaaactctgaactgacatcatcatatgaacagttcagtagatgaagggcagactctagacaggaacaccagagcatatattgcttctcagatgaagaatattcctcattttccatggaggtgatcaatgctgggctggatggagctctgggcaacgtgattgctgggtggcaaccctgcccaaggcataggggctggagctcaatgatmtttaaggtcctttccaacccamrccattctatgattctatggttctgatttccagtagaggatacagacccttggctttcagtgtatcctctgaaatccttcccttataggaactacatttatctccccaagaataggagagcygattcttcaaggaactatacrtatttacacgrgatcatctttgatggctcaaaacctgtgttcaggtgtttaatcatcatccaaagattctcttagaagaaggcaggcacagctacccaagaacaggtatgtacctaaactgaagctgttttagcagwgaggccagagccaagagctg

SEQ ID NO: 93431 - DNA, 600 bp, Chicken  19866894411949_3
caaacaatataaccatactttttcacatgctgacacttaagggtctttttatctccaagagcttttagaaaactctgaactgacatcatcatatgaacagttcagtagatgaagggcagactctagacaggaacaccagagcatatattgcttctcagatgaagaatattcctcattttccatggaggtgatcaatgctgggctggatggagctctgggcaacgtgattgctgggtggcaaccctgcccaaggcataggggctggagctcaatgatmtttaaggtcctttccaacccamrccattctatgattctatggttctgatttccagtagaggatacagacccttggctttcagtgtatcctctgaaatccttcccttataggaactacatttatctccccaagaataggagagcygattcttcaaggaactatacrtatttacacgrgatcatctttgatggctcaaaacctgtgttcaggtgtttaatcatcatccaaagattctcttagaagaaggcaggcacagctacccaagaacaggtatgtacctaaactgaagctgttttagcagwgaggccagagccaagagctgc

SEQ ID NO: 93432 - DNA, 600 bp, Chicken  19866894411949_4
tctagacaggaacaccagagcatatattgcttctcagatgaagaatattcctcattttccatggaggtgatcaatgctgggctggatggagctctgggcaacgtgattgctgggtggcaaccctgcccaaggcataggggctggagctcaatgatmtttaaggtcctttccaacccamrccattctatgattctatggttctgatttccagtagaggatacagacccttggctttcagtgtatcctctgaaatccttcccttataggaactacatttatctccccaagaataggagagcygattcttcaaggaactatacrtatttacacgrgatcatctttgatggctcaaaacctgtgttcaggtgtttaatcatcatccaaagattctcttagaagaaggcaggcacagctacccaagaacaggtatgtacctaaactgaagctgttttagcagwgaggccagagccaagagctgcctctggttacgcagataagctccatgctctttgatgctcagcccagccttcagtctactttctcacagtgtttcataatgagggacagctccatacatttcaaaccgaggctactgagagt

SEQ ID NO: 93433 - DNA, 600 bp, Chicken  19866894411949_5
atatattgcttctcagatgaagaatattcctcattttccatggaggtgatcaatgctgggctggatggagctctgggcaacgtgattgctgggtggcaaccctgcccaaggcataggggctggagctcaatgatmtttaaggtcctttccaacccamrccattctatgattctatggttctgatttccagtagaggatacagacccttggctttcagtgtatcctctgaaatccttcccttataggaactacatttatctccccaagaataggagagcygattcttcaaggaactatacrtatttacacgrgatcatctttgatggctcaaaacctgtgttcaggtgtttaatcatcatccaaagattctcttagaagaaggcaggcacagctacccaagaacaggtatgtacctaaactgaagctgttttagcagwgaggccagagccaagagctgcctctggttacgcagataagctccatgctctttgatgctcagcccagccttcagtctactttctcacagtgtttcataatgagggacagctccatacatttcaaaccgaggctactgagagtaagtgctttgtcacacacacg

SEQ ID NO: 93434 - DNA, 600 bp, Chicken  19866894411949_6
ctcagatgaagaatattcctcattttccatggaggtgatcaatgctgggctggatggagctctgggcaacgtgattgctgggtggcaaccctgcccaaggcataggggctggagctcaatgatmtttaaggtcctttccaacccamrccattctatgattctatggttctgatttccagtagaggatacagacccttggctttcagtgtatcctctgaaatccttcccttataggaactacatttatctccccaagaataggagagcygattcttcaaggaactatacrtatttacacgrgatcatctttgatggctcaaaacctgtgttcaggtgtttaatcatcatccaaagattctcttagaagaaggcaggcacagctacccaagaacaggtatgtacctaaactgaagctgttttagcagwgaggccagagccaagagctgcctctggttacgcagataagctccatgctctttgatgctcagcccagccttcagtctactttctcacagtgtttcataatgagggacagctccatacatttcaaaccgaggctactgagagtaagtgctttgtcacacacacggttgcagaatt

SEQ ID NO: 93435 - DNA, 600 bp, Chicken  19866894411949_7
taaggtcctttccaacccamrccattctatgattctatggttctgatttccagtagaggatacagacccttggctttcagtgtatcctctgaaatccttcccttataggaactacatttatctccccaagaataggagagcygattcttcaaggaactatacrtatttacacgrgatcatctttgatggctcaaaacctgtgttcaggtgtttaatcatcatccaaagattctcttagaagaaggcaggcacagctacccaagaacaggtatgtacctaaactgaagctgttttagcagwgaggccagagccaagagctgcctctggttacgcagataagctccatgctctttgatgctcagcccagccttcagtctactttctcacagtgtttcataatgagggacagctccatacatttcaaaccgaggctactgagagtaagtgctttgtcacacacacggttgcagaatttaccttgtaaacttcagagcctttggtttgctgtgaaaaataaatcaactactgcatgcaacatgcacacaggtaccaaattcaaaaccccacgagtggagctgaaggcttttatgatgcacagcg

SEQ ID NO: 93436 - DNA, 600 bp, Chicken  19866894411950_1
tgtttggtgctttgggctgccagggcatgctgctgccttgcattcaactttccgtcacccagaacgccatgttcctttccaggattatgctaattttgaatttgtgttagtttattattattattgttattattattattattattcactgtttacctaaagaaaaccaataactataggggatgggcatctaggagagaaactgaaacctcatagatgcagttcaaaagcgatgttcattttcagcctcagaaccaatacattcaaacttcctggtttacatgaaattagtcagaggtrtcatttcagaggactgaatgctttctaacttctgttcacaagaaggccagaggtaacttataagtagtagcaggagtattcactgctgtccatgtttatttgtttcatttgtttcttccattcagtgtcaaagaattttatttttataagaaaaaaaatacaataaaattccawmagaggtattctgtatttagcctcaatgtgattaataataataataagagaacttaagagtgattctcttaatcctggctaaaactgaatttaatcagttcacaacccattattctaattctgtgc

SEQ ID NO: 93437 - DNA, 600 bp, Chicken  19866894411950_2
tataggggatgggcatctaggagagaaactgaaacctcatagatgcagttcaaaagcgatgttcattttcagcctcagaaccaatacattcaaacttcctggtttacatgaaattagtcagaggtrtcatttcagaggactgaatgctttctaacttctgttcacaagaaggccagaggtaacttataagtagtagcaggagtattcactgctgtccatgtttatttgtttcatttgtttcttccattcagtgtcaaagaattttatttttataagaaaaaaaatacaataaaattccawmagaggtattctgtatttagcctcaatgtgattaataataataataagagaacttaagagtgattctcttaatcctggctaaaactgaatttaatcagttcacaacccattattctaattctgtgcatagagaaggatcctaccaggagaagtaggctctccactttaacccagctgagataactgtgttcctaaccgttataattctcctccagtgtgtggtggtcattatatttcctggaatggaagtctgagttccccttactacccaagttactacccaccaaacattgactgcag

SEQ ID NO: 93438 - DNA, 600 bp, Chicken  19866894411950_3
ataggggatgggcatctaggagagaaactgaaacctcatagatgcagttcaaaagcgatgttcattttcagcctcagaaccaatacattcaaacttcctggtttacatgaaattagtcagaggtrtcatttcagaggactgaatgctttctaacttctgttcacaagaaggccagaggtaacttataagtagtagcaggagtattcactgctgtccatgtttatttgtttcatttgtttcttccattcagtgtcaaagaattttatttttataagaaaaaaaatacaataaaattccawmagaggtattctgtatttagcctcaatgtgattaataataataataagagaacttaagagtgattctcttaatcctggctaaaactgaatttaatcagttcacaacccattattctaattctgtgcatagagaaggatcctaccaggagaagtaggctctccactttaacccagctgagataactgtgttcctaaccgttataattctcctccagtgtgtggtggtcattatatttcctggaatggaagtctgagttccccttactacccaagttactacccaccaaacattgactgcagc

SEQ ID NO: 93439 - DNA, 600 bp, Chicken  19866894411952_1
tgacatataagtagtgaattgtcattctgatcatttaaaacaagtatctgagaactgaacaaagagtaaaaacacagaatatcccgagttggaagggatcacaaagaccatggagtccaactcctggctacacacagcaccacccaaatggtgtccaaacactctttgaactccggcagcttggggtcgtgcccacagccctgggcagcctgttccagggcccgaccatcctctggtgcagaccctgtccctaacccccagctgcccctcccctgacacagcctccatgctgttccctcrggccctgttgctrtcccagagagcagagctcagygctggcccttcactcccctcatgaggggctgcaggcaaccatgagatgtcacttcagcctccttttctctgggccaaactatctatgggacctcagctgctcctcttattgttcctcatttgctttgccctcaagatcctccaccatctttgtagccctcctttgaatactggttaataattttatgccctccttatattgtggcacccacagctgcatccagtgtaggaggtgaggccacacagtgcagagcagagcaggacaac

SEQ ID NO: 93440 - DNA, 600 bp, Chicken  19866894411952_2
gtgaattgtcattctgatcatttaaaacaagtatctgagaactgaacaaagagtaaaaacacagaatatcccgagttggaagggatcacaaagaccatggagtccaactcctggctacacacagcaccacccaaatggtgtccaaacactctttgaactccggcagcttggggtcgtgcccacagccctgggcagcctgttccagggcccgaccatcctctggtgcagaccctgtccctaacccccagctgcccctcccctgacacagcctccatgctgttccctcrggccctgttgctrtcccagagagcagagctcagygctggcccttcactcccctcatgaggggctgcaggcaaccatgagatgtcacttcagcctccttttctctgggccaaactatctatgggacctcagctgctcctcttattgttcctcatttgctttgccctcaagatcctccaccatctttgtagccctcctttgaatactggttaataattttatgccctccttatattgtggcacccacagctgcatccagtgtaggaggtgaggccacacagtgcagagcagagcaggacaacccctcccctgcct

SEQ ID NO: 93441 - DNA, 600 bp, Chicken  19866894411952_3
ttaaaacaagtatctgagaactgaacaaagagtaaaaacacagaatatcccgagttggaagggatcacaaagaccatggagtccaactcctggctacacacagcaccacccaaatggtgtccaaacactctttgaactccggcagcttggggtcgtgcccacagccctgggcagcctgttccagggcccgaccatcctctggtgcagaccctgtccctaacccccagctgcccctcccctgacacagcctccatgctgttccctcrggccctgttgctrtcccagagagcagagctcagygctggcccttcactcccctcatgaggggctgcaggcaaccatgagatgtcacttcagcctccttttctctgggccaaactatctatgggacctcagctgctcctcttattgttcctcatttgctttgccctcaagatcctccaccatctttgtagccctcctttgaatactggttaataattttatgccctccttatattgtggcacccacagctgcatccagtgtaggaggtgaggccacacagtgcagagcagagcaggacaacccctcccctgcctrgtggcagcactgggcctgat

SEQ ID NO: 93442 - DNA, 432 bp, Chicken  19866894411952_4
cccagagagcagagctcagygctggcccttcactcccctcatgaggggctgcaggcaaccatgagatgtcacttcagcctccttttctctgggccaaactatctatgggacctcagctgctcctcttattgttcctcatttgctttgccctcaagatcctccaccatctttgtagccctcctttgaatactggttaataattttatgccctccttatattgtggcacccacagctgcatccagtgtaggaggtgaggccacacagtgcagagcagagcaggacaacccctcccctgcctrgtggcagcactgggcctgatgcaccccagggtatgtttggtgctttgggctgccagggcatgctgctgccttgcattcaactttccgtcacccagaacgccatgttcctttccaggattatgctaattttga

SEQ ID NO: 93443 - DNA, 600 bp, Chicken  19866894411955_1
acatgaactacaccaagcctgcttacttattttgaaaatccacgtagaaagcagtaacatcagcatgaaaaataattttctaaaagctttatccctcactgtaccactgttgtatccaattagtgctctcccaaaggaagtttcatcacctggtgtgcacaaagatactgatttattgcaaagctgcacaagtttcagttttaggttgtctcccaccgtgctagcacaaactaagattttcacagtgctttttaatacatactttcatctcctgaccacttctctgatacagcctccagsctacaaccagtcagttaaagatagggctcatstccctacctgcaggccagctaggyatgctaattaactgcatgttgtctcaggactcttctgtcttcaaagacaagcttagtcatggcactgtggttaaggattcttctagttaatcacgttctcactttcaagtatgaccaatctcaacctggtaaaaagtacattccttcrttatctaaggatatgcatacaaacacttatacttactagctcttacttgactggcaacactaggatagaagatcactggtaaagggtctatgacta

SEQ ID NO: 93444 - DNA, 600 bp, Chicken  19866894411955_2
tgaaaatccacgtagaaagcagtaacatcagcatgaaaaataattttctaaaagctttatccctcactgtaccactgttgtatccaattagtgctctcccaaaggaagtttcatcacctggtgtgcacaaagatactgatttattgcaaagctgcacaagtttcagttttaggttgtctcccaccgtgctagcacaaactaagattttcacagtgctttttaatacatactttcatctcctgaccacttctctgatacagcctccagsctacaaccagtcagttaaagatagggctcatstccctacctgcaggccagctaggyatgctaattaactgcatgttgtctcaggactcttctgtcttcaaagacaagcttagtcatggcactgtggttaaggattcttctagttaatcacgttctcactttcaagtatgaccaatctcaacctggtaaaaagtacattccttcrttatctaaggatatgcatacaaacacttatacttactagctcttacttgactggcaacactaggatagaagatcactggtaaagggtctatgactaggcatatggatgaaggatacacagaatagctc

SEQ ID NO: 93445 - DNA, 600 bp, Chicken  19866894411955_3
acatcagcatgaaaaataattttctaaaagctttatccctcactgtaccactgttgtatccaattagtgctctcccaaaggaagtttcatcacctggtgtgcacaaagatactgatttattgcaaagctgcacaagtttcagttttaggttgtctcccaccgtgctagcacaaactaagattttcacagtgctttttaatacatactttcatctcctgaccacttctctgatacagcctccagsctacaaccagtcagttaaagatagggctcatstccctacctgcaggccagctaggyatgctaattaactgcatgttgtctcaggactcttctgtcttcaaagacaagcttagtcatggcactgtggttaaggattcttctagttaatcacgttctcactttcaagtatgaccaatctcaacctggtaaaaagtacattccttcrttatctaaggatatgcatacaaacacttatacttactagctcttacttgactggcaacactaggatagaagatcactggtaaagggtctatgactaggcatatggatgaaggatacacagaatagctccaacgttcgttaccacctggtttt

SEQ ID NO: 93446 - DNA, 600 bp, Chicken  19866894411955_4
gttgtctcccaccgtgctagcacaaactaagattttcacagtgctttttaatacatactttcatctcctgaccacttctctgatacagcctccagsctacaaccagtcagttaaagatagggctcatstccctacctgcaggccagctaggyatgctaattaactgcatgttgtctcaggactcttctgtcttcaaagacaagcttagtcatggcactgtggttaaggattcttctagttaatcacgttctcactttcaagtatgaccaatctcaacctggtaaaaagtacattccttcrttatctaaggatatgcatacaaacacttatacttactagctcttacttgactggcaacactaggatagaagatcactggtaaagggtctatgactaggcatatggatgaaggatacacagaatagctccaacgttcgttaccacctggttttctgggggagaagggatctacgagtagcagaaccccactttgccatgtccagtacatgctttgcatcagtttataccagatttttctttttagcaagactagagttaaatccagcacatggtgacatcctttatgctacagctgtcttt

SEQ ID NO: 93447 - DNA, 600 bp, Chicken  19866894411962_1
catctgcatgaaaaactcttgtttgcacatatgcagtaggcaattatgtgacacactgcttttgcacattgctaatctacacccacaacagatctaattacaattttacaggcagagtttaaagaccttgtctcaaagtgttgatttttactttagaaatgaaattaaccaccaagaagaaacagaaaaataacaactctagaaagcaaatctgacttgaaaattgaggcagagaagctgttcggcagccagggacccttatggcctctgccacttgatttcatggtcctattccagctrtcagaaaaaasaatagatgaaaatatggtgaaaagactgaatattctaccaaaatacaactacgttccataaatgccaacatgtataaagtaatcattgccataaaagaatagcacccatttatcattttatatgtactgaaacttgtcatcacaatcatattgtgtgctaaggagattaaacacagctctgttgtgagataattcttgaccagtaacagacttttttttcttttgattaacttcttttcaccagcactgtgtctggggaactctgcttctttccatctgcctgctaagt

SEQ ID NO: 93448 - DNA, 600 bp, Chicken  19866894411962_2
aaaactcttgtttgcacatatgcagtaggcaattatgtgacacactgcttttgcacattgctaatctacacccacaacagatctaattacaattttacaggcagagtttaaagaccttgtctcaaagtgttgatttttactttagaaatgaaattaaccaccaagaagaaacagaaaaataacaactctagaaagcaaatctgacttgaaaattgaggcagagaagctgttcggcagccagggacccttatggcctctgccacttgatttcatggtcctattccagctrtcagaaaaaasaatagatgaaaatatggtgaaaagactgaatattctaccaaaatacaactacgttccataaatgccaacatgtataaagtaatcattgccataaaagaatagcacccatttatcattttatatgtactgaaacttgtcatcacaatcatattgtgtgctaaggagattaaacacagctctgttgtgagataattcttgaccagtaacagacttttttttcttttgattaacttcttttcaccagcactgtgtctggggaactctgcttctttccatctgcctgctaagtttctgtattct

SEQ ID NO: 93449 - DNA, 600 bp, Chicken  19866894411964_1
acatagctacacagctatgtttcctgtgttacgtataagggcattgcatcacgtgcaatattagtccgttaatcacaaccaccatccataacaggaggtgtgcccaccctcatcaagggaaacagaatttctcctgtttggagacggggacccctttagattggatccatttcttcctctgctgcctcactgtgtttctatttttctctttgaactgcagcaaccgatgtggaaaaagtgaaggattgcatctgtgcctgtctgataacaaagcaacataaagtctggtaagaggaagcwaggcaacgtgcaattagtaacagtaatactttggaatggatgcttattcttctgggctacctatggaagacaagaataccaaacgttgttattggtattacctccgttacccaatgcagaccatttacagccagaggactttctggtggtattaaagatcaaggaagctgcatctttgcttgcatatttctatgcastttattagctcttgttctcagacagctgcttgcaaatcctccgtccccgtttgttatctgtttgctccatcccttctctgtaacagaagaactttgcagttta

SEQ ID NO: 93450 - DNA, 600 bp, Chicken  19866894411964_2
ctatttttctctttgaactgcagcaaccgatgtggaaaaagtgaaggattgcatctgtgcctgtctgataacaaagcaacataaagtctggtaagaggaagcwaggcaacgtgcaattagtaacagtaatactttggaatggatgcttattcttctgggctacctatggaagacaagaataccaaacgttgttattggtattacctccgttacccaatgcagaccatttacagccagaggactttctggtggtattaaagatcaaggaagctgcatctttgcttgcatatttctatgcastttattagctcttgttctcagacagctgcttgcaaatcctccgtccccgtttgttatctgtttgctccatcccttctctgtaacagaagaactttgcagtttaagagggcggttgtgacattaatacaaatgctttaacatgatctctccctctcttctttattttaattcttcattctaagaaaaataacagcgctgctgttaacaccagaataaatgctgcagccagtcccacagcctgggctctctcccgtgtatggacatgcctggaactcgcatggttttgttcctaagagcagc

SEQ ID NO: 93451 - DNA, 600 bp, Chicken  19866894411975_1
aaacactttagtttttatcaactttgctatccagtgtagtttagtctggctttaaatggaagaactgcttaccttttaatagctgaaacactaataagcttttctgcatgcaatctgaatgttgcaaaatagcaaactaaaaccactgtaacttgttttgatataaaagcttgatgagccaaaataatgtacctactttgcaccttttgatattatgctgttagggtagtcctgacagatgaaaggaaaactccagtttttcattgagatttgcaaaccagctattctgtgtgaatacaygttagggcacaattttatatgcaaaaccagccactattaatgtagaagggaagctctctcrttctgttaggcactatcactttttcagaggggtgcatcagtggttgcctttttcgtatagcttagcttaaagcaggttttcaccttcagaaatttagttgctcctcatcacttggcatattccttatgcataaactgtagtatcaaacaagggtgctggcagtactatagttaggcccccagtttatagtgatgtatctgctaaccagagaaaatatactggtatctgtagtttagcca

SEQ ID NO: 93452 - DNA, 600 bp, Chicken  19866894411975_2
gaactgcttaccttttaatagctgaaacactaataagcttttctgcatgcaatctgaatgttgcaaaatagcaaactaaaaccactgtaacttgttttgatataaaagcttgatgagccaaaataatgtacctactttgcaccttttgatattatgctgttagggtagtcctgacagatgaaaggaaaactccagtttttcattgagatttgcaaaccagctattctgtgtgaatacaygttagggcacaattttatatgcaaaaccagccactattaatgtagaagggaagctctctcrttctgttaggcactatcactttttcagaggggtgcatcagtggttgcctttttcgtatagcttagcttaaagcaggttttcaccttcagaaatttagttgctcctcatcacttggcatattccttatgcataaactgtagtatcaaacaagggtgctggcagtactatagttaggcccccagtttatagtgatgtatctgctaaccagagaaaatatactggtatctgtagtttagccatgtttaagatgctccatctaatgtaacttgtaataggaaatggaggttaaattttgtcttt

SEQ ID NO: 93453 - DNA, 600 bp, Chicken  19866894411994_1
taccactgaggagaacctggcctcatccatttgccttccatctccctttacatatatataaacactggtcagatctcccctcagtcttcttttccccaagctgaaaagacccaggttactcagcctttcctcataggggagatgctccaggcccgttatcatctatgtggccctccactggactccttctaggagatccctgtcttttttgaactggggagcctagaactggacacagtattttaaatgtggcctcactggggcagagtagaggtagaggatcacctccctcaacctacyagccacgctccttttaatgtaccccacgataccattggctttcwtggccamaaaggcacacygctggctcatggccaccctgttgtccacaagaacacccaggtccttctccgcacacacarcatacacacactttgtcatttctacaacatgctgagtgactgagtggttgcatggccattttcttatctgtagttcacatcttggcatatacttaggcccagttaaagcaatrgaacgcatgcttgatccatgaagaccaacagtacacttaattagacatataacataactaaatgt

SEQ ID NO: 93454 - DNA, 600 bp, Chicken  19866894411994_2
cctttacatatatataaacactggtcagatctcccctcagtcttcttttccccaagctgaaaagacccaggttactcagcctttcctcataggggagatgctccaggcccgttatcatctatgtggccctccactggactccttctaggagatccctgtcttttttgaactggggagcctagaactggacacagtattttaaatgtggcctcactggggcagagtagaggtagaggatcacctccctcaacctacyagccacgctccttttaatgtaccccacgataccattggctttcwtggccamaaaggcacacygctggctcatggccaccctgttgtccacaagaacacccaggtccttctccgcacacacarcatacacacactttgtcatttctacaacatgctgagtgactgagtggttgcatggccattttcttatctgtagttcacatcttggcatatacttaggcccagttaaagcaatrgaacgcatgcttgatccatgaagaccaacagtacacttaattagacatataacataactaaatgtgggtggccaagtattcccagccttgcatmctcctagcagaaagt

SEQ ID NO: 93455 - DNA, 600 bp, Chicken  19866894411994_3
atatatataaacactggtcagatctcccctcagtcttcttttccccaagctgaaaagacccaggttactcagcctttcctcataggggagatgctccaggcccgttatcatctatgtggccctccactggactccttctaggagatccctgtcttttttgaactggggagcctagaactggacacagtattttaaatgtggcctcactggggcagagtagaggtagaggatcacctccctcaacctacyagccacgctccttttaatgtaccccacgataccattggctttcwtggccamaaaggcacacygctggctcatggccaccctgttgtccacaagaacacccaggtccttctccgcacacacarcatacacacactttgtcatttctacaacatgctgagtgactgagtggttgcatggccattttcttatctgtagttcacatcttggcatatacttaggcccagttaaagcaatrgaacgcatgcttgatccatgaagaccaacagtacacttaattagacatataacataactaaatgtgggtggccaagtattcccagccttgcatmctcctagcagaaagtcaaacta

SEQ ID NO: 93456 - DNA, 600 bp, Chicken  19866894411994_4
cactggtcagatctcccctcagtcttcttttccccaagctgaaaagacccaggttactcagcctttcctcataggggagatgctccaggcccgttatcatctatgtggccctccactggactccttctaggagatccctgtcttttttgaactggggagcctagaactggacacagtattttaaatgtggcctcactggggcagagtagaggtagaggatcacctccctcaacctacyagccacgctccttttaatgtaccccacgataccattggctttcwtggccamaaaggcacacygctggctcatggccaccctgttgtccacaagaacacccaggtccttctccgcacacacarcatacacacactttgtcatttctacaacatgctgagtgactgagtggttgcatggccattttcttatctgtagttcacatcttggcatatacttaggcccagttaaagcaatrgaacgcatgcttgatccatgaagaccaacagtacacttaattagacatataacataactaaatgtgggtggccaagtattcccagccttgcatmctcctagcagaaagtcaaactatgtatttccta

SEQ ID NO: 93457 - DNA, 600 bp, Chicken  19866894411994_5
gcctttcctcataggggagatgctccaggcccgttatcatctatgtggccctccactggactccttctaggagatccctgtcttttttgaactggggagcctagaactggacacagtattttaaatgtggcctcactggggcagagtagaggtagaggatcacctccctcaacctacyagccacgctccttttaatgtaccccacgataccattggctttcwtggccamaaaggcacacygctggctcatggccaccctgttgtccacaagaacacccaggtccttctccgcacacacarcatacacacactttgtcatttctacaacatgctgagtgactgagtggttgcatggccattttcttatctgtagttcacatcttggcatatacttaggcccagttaaagcaatrgaacgcatgcttgatccatgaagaccaacagtacacttaattagacatataacataactaaatgtgggtggccaagtattcccagccttgcatmctcctagcagaaagtcaaactatgtatttcctagggggcattttgctctgtatatacacaatcagaggagctttaatgcctatgagcagcata

SEQ ID NO: 93458 - DNA, 507 bp, Chicken  19866894411994_6
cagtattttaaatgtggcctcactggggcagagtagaggtagaggatcacctccctcaacctacyagccacgctccttttaatgtaccccacgataccattggctttcwtggccamaaaggcacacygctggctcatggccaccctgttgtccacaagaacacccaggtccttctccgcacacacarcatacacacactttgtcatttctacaacatgctgagtgactgagtggttgcatggccattttcttatctgtagttcacatcttggcatatacttaggcccagttaaagcaatrgaacgcatgcttgatccatgaagaccaacagtacacttaattagacatataacataactaaatgtgggtggccaagtattcccagccttgcatmctcctagcagaaagtcaaactatgtatttcctagggggcattttgctctgtatatacacaatcagaggagctttaatgcctatgagcagcataggttttcacttactattcgt

SEQ ID NO: 93459 - DNA, 413 bp, Chicken  19866894411994_7
taccattggctttcwtggccamaaaggcacacygctggctcatggccaccctgttgtccacaagaacacccaggtccttctccgcacacacarcatacacacactttgtcatttctacaacatgctgagtgactgagtggttgcatggccattttcttatctgtagttcacatcttggcatatacttaggcccagttaaagcaatrgaacgcatgcttgatccatgaagaccaacagtacacttaattagacatataacataactaaatgtgggtggccaagtattcccagccttgcatmctcctagcagaaagtcaaactatgtatttcctagggggcattttgctctgtatatacacaatcagaggagctttaatgcctatgagcagcataggttttcacttactattcgt

SEQ ID NO: 93460 - DNA, 600 bp, Chicken  19866894412003_1
taaaagagaataggtaatctgaaggatttaaatttggttctgaagctcagctggagagagattgaagcaaagaaaaactatgttgacaagagacagcaggaaatgtcagtctacctccattctccttattgaaaaatgtaatgttgtaaatgtccagttctaattgctatttgaagacctttgactttagaagtaattgacattataaaagctcctttttgcctcagtaagcaatttagaaagcagaagatgtgatggaaaacggaatacagatagaaaaacttgaataaaacgagaaaygtttggtctgaactcaaacttcttatacatggattcctcagtgaaaacattcagatcaggatacataaaaatctaaaaccttttccttattagcaagcattagtaatataagctttcctgcraaaggaagccatgccacactttcatctcatttttccagccaggtaacactgatcccaagtgaattcctcgccaagcaggggtgccacgtgtcaccagaaaacactggcagcagtgacacactggcccgggctgcacgtgcaggcagaagaaggcatgctgccatctccatgtcctccc

SEQ ID NO: 93461 - DNA, 600 bp, Chicken  19866894412003_2
tccttattgaaaaatgtaatgttgtaaatgtccagttctaattgctatttgaagacctttgactttagaagtaattgacattataaaagctcctttttgcctcagtaagcaatttagaaagcagaagatgtgatggaaaacggaatacagatagaaaaacttgaataaaacgagaaaygtttggtctgaactcaaacttcttatacatggattcctcagtgaaaacattcagatcaggatacataaaaatctaaaaccttttccttattagcaagcattagtaatataagctttcctgcraaaggaagccatgccacactttcatctcatttttccagccaggtaacactgatcccaagtgaattcctcgccaagcaggggtgccacgtgtcaccagaaaacactggcagcagtgacacactggcccgggctgcacgtgcaggcagaagaaggcatgctgccatctccatgtcctcccaccccatcttcctctcgacacctcccactttctccttcctcttgacaccacactcaaaatgccatatatgcttctctaggcttaaaactatctctgccccagattattcagctggatcctgg

SEQ ID NO: 93462 - DNA, 600 bp, Chicken  19866894412003_3
atgccacactttcatctcatttttccagccaggtaacactgatcccaagtgaattcctcgccaagcaggggtgccacgtgtcaccagaaaacactggcagcagtgacacactggcccgggctgcacgtgcaggcagaagaaggcatgctgccatctccatgtcctcccaccccatcttcctctcgacacctcccactttctccttcctcttgacaccacactcaaaatgccatatatgcttctctaggcttaaaactatctctgccccagattattcagctggatcctggagaagcttayattgagcagaccagcaagagcagaatagattacttaatagcatagttagctaaatattcttggcaagcaaaatttcagcaaaatcttatttttcagaaagctgaaaggctgcccagagatttttcagtcgacgaaggatgaactgttaaaacaaagaattgtgcaatgtgagacagagacagtacaaaatacagacacaaatgtatccacattctcaccccatatgctcattcagcataattctgtgccttgaaaatgctcaaaggttttgcttaaccttgtaataagccatttcaaaaa

SEQ ID NO: 93463 - DNA, 475 bp, Chicken  19866894412019_1
cccaccacacgtgttcatatataggctgcttctactacctcaatccctgcctgaactgaaagtcagtagatgtaatgcacggccagcgttgccagctgggcacctctgcgttgctctggggtattgcagcagccctgaagccctgcacacagtccagacccacgtcccctccacactgcacaaacaggggaaaaagggacagttcacatcttcagctcctcctggttctttggaatcacactgctccaagtcgagactttggcaaggataaaaatcccaggagggaatggttcatctctragcagggaaattcttttaagtacaattacagctgggtgccagagtttagaataaggtctcctgcacggcaaggctgtctgccagtttttctaaagcatacgtgtaatttatgcgtggtttctggtaattatgctcgctactttcgaggaccatcacgctaatttaattgaaaaat

SEQ ID NO: 93464 - DNA, 600 bp, Chicken  19866894412021_1
catttttaaaacacgcaaagagcaagacaatcctttttaggagaccactggataaaacaaaataaacaaatctctgtgtggtgtgagcaagggtgatggaaacaggccatttgtgggtatcttgcatgtcaagacctatttttccatttcagtgaccagacatttagttttttcatattctggctgaatatcccctcagcacaatccaagagatgttcccacctcatagaaattgcaagaaaatctaattatttttgcattgagcaaataaaagaaatgtatccaccagactccatgagstggagaccactcagaagctagaratggcaaccaaaaggaaactcactctcagaaaacaatctgtcttcttggtttggtgttcgcctggaatgtaaagcatgtctcctgctcaccagctggctaacttcaggaaagcaaaagccaagttcaaatgccgtggatcagtaactgagttagcacatgctgactccagctcggtagacaaccagacaagaatgttattacaaactaaccacacttttaaaaagatatgtctgtgggggactttttgctagagtagagaaaggagttcagggtggc

SEQ ID NO: 93465 - DNA, 600 bp, Chicken  19866894412021_2
aagacaatcctttttaggagaccactggataaaacaaaataaacaaatctctgtgtggtgtgagcaagggtgatggaaacaggccatttgtgggtatcttgcatgtcaagacctatttttccatttcagtgaccagacatttagttttttcatattctggctgaatatcccctcagcacaatccaagagatgttcccacctcatagaaattgcaagaaaatctaattatttttgcattgagcaaataaaagaaatgtatccaccagactccatgagstggagaccactcagaagctagaratggcaaccaaaaggaaactcactctcagaaaacaatctgtcttcttggtttggtgttcgcctggaatgtaaagcatgtctcctgctcaccagctggctaacttcaggaaagcaaaagccaagttcaaatgccgtggatcagtaactgagttagcacatgctgactccagctcggtagacaaccagacaagaatgttattacaaactaaccacacttttaaaaagatatgtctgtgggggactttttgctagagtagagaaaggagttcagggtggcccaaactgagacattcccagtat

SEQ ID NO: 93466 - DNA, 600 bp, Chicken  19866894412026_1
gcttcctgattcttgggcattaacagaacaggcagccttatgttggggatgctagtgaccctgaagttgtctctttagtgatttttcaaaaaatgtttcaaaattctaggcatgctttctgtcctgttgacttaattctgtgttacacttccaatatcatttattttgttagagtggctgctggcaaggtagctggaaatgtaccgaatgtctaattgtggaaatcagcagaatactgaaaaactggtattgttatttggccagaaccaaattacaagccaaacagtggttagagcaatratatattgcagcagtatattggcaatggaaaacaagtcaaccttggaaagcagaacttaaaagtragaattcattatagaaaaagcactgcagatagcatacttgcttctgattaatcttttragaaccttcttgaatttctggtgaactgtaatcatttgtttgtataaacatattcatcactttctggtttaagtacagtttttatcagtggagaaaaaaaaagacaacactaaaacagcacctagaaaataaaggtgcaagagtgagaaatagcaacacatagcatctcagaagata

SEQ ID NO: 93467 - DNA, 600 bp, Chicken  19866894412026_2
gttgtctctttagtgatttttcaaaaaatgtttcaaaattctaggcatgctttctgtcctgttgacttaattctgtgttacacttccaatatcatttattttgttagagtggctgctggcaaggtagctggaaatgtaccgaatgtctaattgtggaaatcagcagaatactgaaaaactggtattgttatttggccagaaccaaattacaagccaaacagtggttagagcaatratatattgcagcagtatattggcaatggaaaacaagtcaaccttggaaagcagaacttaaaagtragaattcattatagaaaaagcactgcagatagcatacttgcttctgattaatcttttragaaccttcttgaatttctggtgaactgtaatcatttgtttgtataaacatattcatcactttctggtttaagtacagtttttatcagtggagaaaaaaaaagacaacactaaaacagcacctagaaaataaaggtgcaagagtgagaaatagcaacacatagcatctcagaagatagctgctcttatcttcttccttaaaagtgaacgatagtgtaaatagtattgtgttatttccagtgg

SEQ ID NO: 93468 - DNA, 600 bp, Chicken  19866894412026_3
ctgttgacttaattctgtgttacacttccaatatcatttattttgttagagtggctgctggcaaggtagctggaaatgtaccgaatgtctaattgtggaaatcagcagaatactgaaaaactggtattgttatttggccagaaccaaattacaagccaaacagtggttagagcaatratatattgcagcagtatattggcaatggaaaacaagtcaaccttggaaagcagaacttaaaagtragaattcattatagaaaaagcactgcagatagcatacttgcttctgattaatcttttragaaccttcttgaatttctggtgaactgtaatcatttgtttgtataaacatattcatcactttctggtttaagtacagtttttatcagtggagaaaaaaaaagacaacactaaaacagcacctagaaaataaaggtgcaagagtgagaaatagcaacacatagcatctcagaagatagctgctcttatcttcttccttaaaagtgaacgatagtgtaaatagtattgtgttatttccagtgggagcagaattgtcctctgttgggcccttaaacctattgtctttaaggttgagtgctta

SEQ ID NO: 93469 - DNA, 600 bp, Chicken  19866894412033_1
gctcggggcgatgaagagctcaactacatctgcatgggggggaaggccgcctcgtcctgctgcagcctggcagctcccaatggccacttcatcccacgcacctgccacccgcagcagcagccccgctaccccagcacgtcgtgctgtccccgagccggtagcgaggacgttgctgacttggacaaggcattcaggaaacggactcactctgcaggcacttcgcccaccatctcccaccagaagacgccttcccagtcttcggtggcctccattgaggagtatacggagatgttgccttcytacccctgcggcggcagccggctgccctcctaccggcactcggccttcgtgcccactcactcctaccctgaggagtgtctggagatgcaccacctggatggcagccatcatcggaccaactccgctccgcacacggatgatggctacatgcccatgtcccccggcgttgcccccttgcccagcggtggggctgcccccaagggcggtgactacatgcccatgagccccaagagcgtgtcggccccgcagcagatcatcaaccctggcagagggggccgccaccctccagccacggtggac

SEQ ID NO: 93470 - DNA, 600 bp, Chicken  19866894412034_1
tgtgccctccgcggccacggtgcatcttttgtttgcgccttcccgaaggcttcctgccgctgccgtgttgtgctcggagctcaggtggggtggggtgaggagaaagctgccctcgagttttgggaccgctcctgtcgtcagcgccgcggcgggctgcgatattgtaaaatgacggtgtgctgatggtgtgcctttatttgatactttataggtcactatcacatgacaaaggctttgagacagcttcatcttcgtctgtctgtagtttccacttgccttcctgggtgagtatgtaaaccrtaygcacagaaaaagagctcgcttcttgctcctgaggcagagcagctctcggtgccgcctcggacatggaagatgctcgtttgggttccgccaccacaggaaacatgtcttctccgggtgcttggcagcagctgctggcttgcraagtttctgcacaggggtcggatgggataagccgagcactgtccgtccttgcatctcctgtcccttcagcactgttttgtctccctttttttttttgttttttttttgaaccctgttttgtaaggatgatgaattcgttggcttagggctgaagtt

SEQ ID NO: 93471 - DNA, 600 bp, Chicken  19866894412034_2
gccctccgcggccacggtgcatcttttgtttgcgccttcccgaaggcttcctgccgctgccgtgttgtgctcggagctcaggtggggtggggtgaggagaaagctgccctcgagttttgggaccgctcctgtcgtcagcgccgcggcgggctgcgatattgtaaaatgacggtgtgctgatggtgtgcctttatttgatactttataggtcactatcacatgacaaaggctttgagacagcttcatcttcgtctgtctgtagtttccacttgccttcctgggtgagtatgtaaaccrtaygcacagaaaaagagctcgcttcttgctcctgaggcagagcagctctcggtgccgcctcggacatggaagatgctcgtttgggttccgccaccacaggaaacatgtcttctccgggtgcttggcagcagctgctggcttgcraagtttctgcacaggggtcggatgggataagccgagcactgtccgtccttgcatctcctgtcccttcagcactgttttgtctccctttttttttttgttttttttttgaaccctgttttgtaaggatgatgaattcgttggcttagggctgaagttttt

SEQ ID NO: 93472 - DNA, 600 bp, Chicken  19866894412034_3
cgcggcgggctgcgatattgtaaaatgacggtgtgctgatggtgtgcctttatttgatactttataggtcactatcacatgacaaaggctttgagacagcttcatcttcgtctgtctgtagtttccacttgccttcctgggtgagtatgtaaaccrtaygcacagaaaaagagctcgcttcttgctcctgaggcagagcagctctcggtgccgcctcggacatggaagatgctcgtttgggttccgccaccacaggaaacatgtcttctccgggtgcttggcagcagctgctggcttgcraagtttctgcacaggggtcggatgggataagccgagcactgtccgtccttgcatctcctgtcccttcagcactgttttgtctccctttttttttttgttttttttttgaaccctgttttgtaaggatgatgaattcgttggcttagggctgaagtttttgaaccgaagtaacgtgaagatgcacagagtgaagtgtggtggtcaaaggcttgttgagatagtgatgaggggaaggacgtggaaaataccaaccgctggagcaggcgatgggaaatctgtgtgggtcaggaatcggygaga

SEQ ID NO: 93473 - DNA, 600 bp, Chicken  19866894412034_4
tgcraagtttctgcacaggggtcggatgggataagccgagcactgtccgtccttgcatctcctgtcccttcagcactgttttgtctccctttttttttttgttttttttttgaaccctgttttgtaaggatgatgaattcgttggcttagggctgaagtttttgaaccgaagtaacgtgaagatgcacagagtgaagtgtggtggtcaaaggcttgttgagatagtgatgaggggaaggacgtggaaaataccaaccgctggagcaggcgatgggaaatctgtgtgggtcaggaatcggygagaggtttgacgtagcagcagygctactacagcaggagttggttcggttctaacacgtaaacagcactaattagaattccacccwtactgtttctgtgttgctgtttgttttttttttgtttgtttggcattgatgaatgcaggtacctctcaatctgaaagacgaaccttagtgacttagtaatagcattcctcagccttcctgtgtgcagcttcctgtctttccttatgctgtggaaaagttctgatgctttctgatgaagaattcgctttcagagctgaagtggatgaggtcacgt

SEQ ID NO: 93474 - DNA, 600 bp, Chicken  19866894412034_5
ggatgggataagccgagcactgtccgtccttgcatctcctgtcccttcagcactgttttgtctccctttttttttttgttttttttttgaaccctgttttgtaaggatgatgaattcgttggcttagggctgaagtttttgaaccgaagtaacgtgaagatgcacagagtgaagtgtggtggtcaaaggcttgttgagatagtgatgaggggaaggacgtggaaaataccaaccgctggagcaggcgatgggaaatctgtgtgggtcaggaatcggygagaggtttgacgtagcagcagygctactacagcaggagttggttcggttctaacacgtaaacagcactaattagaattccacccwtactgtttctgtgttgctgtttgttttttttttgtttgtttggcattgatgaatgcaggtacctctcaatctgaaagacgaaccttagtgacttagtaatagcattcctcagccttcctgtgtgcagcttcctgtctttccttatgctgtggaaaagttctgatgctttctgatgaagaattcgctttcagagctgaagtggatgaggtcacgtaaaggagaggttgtacatttgtg

SEQ ID NO: 93475 - DNA, 600 bp, Chicken  19866894412034_6
ccctttttttttttgttttttttttgaaccctgttttgtaaggatgatgaattcgttggcttagggctgaagtttttgaaccgaagtaacgtgaagatgcacagagtgaagtgtggtggtcaaaggcttgttgagatagtgatgaggggaaggacgtggaaaataccaaccgctggagcaggcgatgggaaatctgtgtgggtcaggaatcggygagaggtttgacgtagcagcagygctactacagcaggagttggttcggttctaacacgtaaacagcactaattagaattccacccwtactgtttctgtgttgctgtttgttttttttttgtttgtttggcattgatgaatgcaggtacctctcaatctgaaagacgaaccttagtgacttagtaatagcattcctcagccttcctgtgtgcagcttcctgtctttccttatgctgtggaaaagttctgatgctttctgatgaagaattcgctttcagagctgaagtggatgaggtcacgtaaaggagaggttgtacatttgtggggttgtgttcatacatagcatgaagcgtgtgccacatggagcacctttcatgccattgccac

SEQ ID NO: 93476 - DNA, 599 bp, Chicken  19866894412035_1
  misc_feature (1)..(159): n is any nucleotide
nnnnnnnnnnnnnnnnnnnnnnnnnnnnnnnnnnnnnnnnnnnnnnnnnnnnnnnnnnnnnnnnnnnnnnnnnnnnnnnnnnnnnnnnnnnnnnnnnnnnnnnnnnnnnnnnnnnnnnnnnnnnnnnnnnnnnnnnnnnnnnnnnnnnnnnnnnnnnnnctgggagaagagaagagaaaacatcagttggtggtaaggataaggaagacaaaaggaggacaacgaagactgctggaaaagagaaagaggttcgtgctgggatgcctgtggaaaacagcatcgtgttctgcagtgcctcgygaggctgtgtgcctgagctggagctgatttccaacccctgaaagggttctgatccrcrtcagttctgttttccaactctgtccctcaaacaggaacgcccaaacagcagaaagtcgaaagtgaargagaagaagaagctgaaatctggcagctcctcagagaaggagatggcacagcccacaggagccgcagctgcagcccctgccgcaccccctcgggagcagatggaccccactgtctgggggctgtaccaggagaagctttacgtcgaagtgagtccggccaaarcttgtgccttc

SEQ ID NO: 93477 - DNA, 599 bp, Chicken  19866894412035_2
  misc_feature (1)..(103): n is any nucleotide
nnnnnnnnnnnnnnnnnnnnnnnnnnnnnnnnnnnnnnnnnnnnnnnnnnnnnnnnnnnnnnnnnnnnnnnnnnnnnnnnnnnnnnnnnnnnnnnnnnnnnnnctgggagaagagaagagaaaacatcagttggtggtaaggataaggaagacaaaaggaggacaacgaagactgctggaaaagagaaagaggttcgtgctgggatgcctgtggaaaacagcatcgtgttctgcagtgcctcgygaggctgtgtgcctgagctggagctgatttccaacccctgaaagggttctgatccrcrtcagttctgttttccaactctgtccctcaaacaggaacgcccaaacagcagaaagtcgaaagtgaargagaagaagaagctgaaatctggcagctcctcagagaaggagatggcacagcccacaggagccgcagctgcagcccctgccgcaccccctcgggagcagatggaccccactgtctgggggctgtaccaggagaagctttacgtcgaagtgagtccggccaaarcttgtgccttcatttctgccttctgtcctttgcttacaaaccgaccctgaggcgcagctggagaggt

SEQ ID NO: 93478 - DNA, 599 bp, Chicken  19866894412035_3
  misc_feature (1)..(101): n is any nucleotide
nnnnnnnnnnnnnnnnnnnnnnnnnnnnnnnnnnnnnnnnnnnnnnnnnnnnnnnnnnnnnnnnnnnnnnnnnnnnnnnnnnnnnnnnnnnnnnnnnnnnnctgggagaagagaagagaaaacatcagttggtggtaaggataaggaagacaaaaggaggacaacgaagactgctggaaaagagaaagaggttcgtgctgggatgcctgtggaaaacagcatcgtgttctgcagtgcctcgygaggctgtgtgcctgagctggagctgatttccaacccctgaaagggttctgatccrcrtcagttctgttttccaactctgtccctcaaacaggaacgcccaaacagcagaaagtcgaaagtgaargagaagaagaagctgaaatctggcagctcctcagagaaggagatggcacagcccacaggagccgcagctgcagcccctgccgcaccccctcgggagcagatggaccccactgtctgggggctgtaccaggagaagctttacgtcgaagtgagtccggccaaarcttgtgccttcatttctgccttctgtcctttgcttacaaaccgaccctgaggcgcagctggagaggtaa

SEQ ID NO: 93479 - DNA, 599 bp, Chicken  19866894412035_4
  misc_feature (1)..(34): n is any nucleotide
nnnnnnnnnnnnnnnnnnnnnnnnnnnnnnnnnnctgggagaagagaagagaaaacatcagttggtggtaaggataaggaagacaaaaggaggacaacgaagactgctggaaaagagaaagaggttcgtgctgggatgcctgtggaaaacagcatcgtgttctgcagtgcctcgygaggctgtgtgcctgagctggagctgatttccaacccctgaaagggttctgatccrcrtcagttctgttttccaactctgtccctcaaacaggaacgcccaaacagcagaaagtcgaaagtgaargagaagaagaagctgaaatctggcagctcctcagagaaggagatggcacagcccacaggagccgcagctgcagcccctgccgcaccccctcgggagcagatggaccccactgtctgggggctgtaccaggagaagctttacgtcgaagtgagtccggccaaarcttgtgccttcatttctgccttctgtcctttgcttacaaaccgaccctgaggcgcagctggagaggtaaagcgttctgttaaactgacagctgtgtgtctgtaattgtgcagcaaggtgggtgtgacgagcgaggg

SEQ ID NO: 93480 - DNA, 600 bp, Chicken  19866894412035_5
gcagtgcctcgygaggctgtgtgcctgagctggagctgatttccaacccctgaaagggttctgatccrcrtcagttctgttttccaactctgtccctcaaacaggaacgcccaaacagcagaaagtcgaaagtgaargagaagaagaagctgaaatctggcagctcctcagagaaggagatggcacagcccacaggagccgcagctgcagcccctgccgcaccccctcgggagcagatggaccccactgtctgggggctgtaccaggagaagctttacgtcgaagtgagtccggccaaarcttgtgccttcatttctgccttctgtcctttgcttacaaaccgaccctgaggcgcagctggagaggtaaagcgttctgttaaactgacagctgtgtgtctgtaattgtgcagcaaggtgggtgtgacgagcgagggaaggcggccctgattccaggctggagcccattaacagaaatgcagccatctccacgtgtgggatttctgcctgggatgtcttttgcacacttggggactctggagggagcagcagaattaattgtatctcagacaatgttaaacacacttcatagccaggaagg

SEQ ID NO: 93481 - DNA, 600 bp, Chicken  19866894412036_1
tattatcagaagcctatctctagctggaagaaaaatgagcagctatagtgaggtcagcatcacaaagccaagtgcaagacccttcattcagacagatgcaggcaccatttagtccagacctgttttccttcactgatcatacatatgtatctgaatgaatacatggcaagcctaacactacatgtggggacagacttcctaatcaggtaagttgttctgttctttaatagccacagtatccacttgtctatttgtgacttaacagtgggatttcacccctagtctccaaggctcaatggygatgcctagcccttggaggcaggttcacatcaaatctractcctgccttctggactgccacagtttacaaacaacctgttttccttagcatatgaggatgtggtaactctgagctcagtaggacacagcccttgaggaagaggagcatttccttgattacaccctctaggctatcccagcaagcagttactccctttcattgagtgtatttgcagggggagtcaatatatacctacttctcaaggtctaatactgaagaaaccatatggccatgaatgcacagactttgcctcttgctcc

SEQ ID NO: 93482 - DNA, 600 bp, Chicken  19866894412036_2
gcagctatagtgaggtcagcatcacaaagccaagtgcaagacccttcattcagacagatgcaggcaccatttagtccagacctgttttccttcactgatcatacatatgtatctgaatgaatacatggcaagcctaacactacatgtggggacagacttcctaatcaggtaagttgttctgttctttaatagccacagtatccacttgtctatttgtgacttaacagtgggatttcacccctagtctccaaggctcaatggygatgcctagcccttggaggcaggttcacatcaaatctractcctgccttctggactgccacagtttacaaacaacctgttttccttagcatatgaggatgtggtaactctgagctcagtaggacacagcccttgaggaagaggagcatttccttgattacaccctctaggctatcccagcaagcagttactccctttcattgagtgtatttgcagggggagtcaatatatacctacttctcaaggtctaatactgaagaaaccatatggccatgaatgcacagactttgcctcttgctccaatgagatgcacaagtttcaacatatcagaaatcattg

SEQ ID NO: 93483 - DNA, 541 bp, Chicken  19866894412049_1
tctgctcgttcgtttcaggtgtcaccagagactgtaactcatctttatggaaccttcatccttgtattctttttcctgaaaacattatccttcttttttggctcaaaggctacattgctttacagtttttgatgccagctggagcagatattcattccaaaacatctgacaactatgctttactgtcagaatatattattcagaagttgaaacaggtctgttcaatgtggattaaagcagagacatcccaggtagttggagaagggttcttcacccaccactgcacatctccgtggcagktgcactcagctctcctcgtgctcagagcagtgacagaactgccctggggaggccattcaccacacctttggatgatgagagaccaccaaaaatgcccatggcttttgaagggatccacattattttacagggtgagtcccatcccagatatccatgttaacaatacagttacaggttaaataatagcagatggcaccattttgatgcatgcagggctataaagtggctggtgatgaggaaa

SEQ ID NO: 93484 - DNA, 600 bp, Chicken  19866894412061_1
gaaaactctcccactgggcaaacttctttccccagaaccatacccaggattcacaacataacagagccagcttttgggaaggagtgctttgctctattctgcaaacaagttcactccttagcagccgcagaagagtgctaacagtgtgacaggagtcattaacaacacacagccccacttagggcagcaggtggtgaactgcagtgctgtggaagacaaatgaagaaatgggagtattgcagacaagtgtccagctttttcagcagtctgcagcagcaagaggctgcagatcagggtttratagtgaaaagcctgaagaaggaaggaaaggaggacaacactaagcgtgaggatgagtaaatactgagaaaagatgtgatgaagggcaccgtgtgtatrtgaggctatakgtgaggtwcagagtatctagaaagttgtgtcaccttcacarcagggctgtcctctctcttcacatatttcatgtttcgatgtttaaatccactactgtatggaaactgagtccaagctgacaggaagccaatacaagcacagttcagactcatttyagcatctgggtacctctctgtattatacccacat

SEQ ID NO: 93485 - DNA, 600 bp, Chicken  19866894412061_10
tacatcatgaccccatctctcctgctcctatcctgcccagaggatgaggctccaatccccttcagctgacaaggwttcagcaggctgctggcactccacaccacagaaaggaacaaatttaacctcactcaatttttgctctttgctgagtaggaaatgcagcctacatgtgcacatgagcatgccacagagaaaggaggacaatgttsctctatactgctcaatgtgtgctcaacagagctgaactctgctctgcatctgcaaggtgcaacacgggctgcaatgggagggatctgggasactttgtctccaaatttgcagctatcaaactgagtagaccttctgtacagcatttaagccagacagggaaccaaagcaggtggctggcatacttctaagctgatatctcccttgtcaagagacatttcattggtaccaacacggcagcgattcacttctcatttttgtccttacaaccatcagactcaggaacacttcacttctgctagatgcgatcctgaccagccacgctgaaatgactataagactcagacttaatttcttccttagaggcagcatctactctctcatcactaagca

SEQ ID NO: 93486 - DNA, 420 bp, Chicken  19866894412061_11
caacacggcagcgattcacttctcatttttgtccttacaaccatcagactcaggaacacttcacttctgctagatgcgatcctgaccagccacgctgaaatgactataagactcagacttaatttcttccttagaggcagcatctactctctcatcactaagcacaagcactttcataaaccaaaaccttgcaagaaagtttcatactccctttcatactcactttttggcttaacaacacaagacaatcagcaacaatcaaaagtaccattctgaaaaagttccaaagggatatttctsaaatttacaaatatgtctctctataatctcagctacctaatacacatactaacttaaagatacattatgaccatacattcttccacacatttgaaatactactccactggtttggcaatt

SEQ ID NO: 93487 - DNA, 600 bp, Chicken  19866894412061_2
tgcaaacaagttcactccttagcagccgcagaagagtgctaacagtgtgacaggagtcattaacaacacacagccccacttagggcagcaggtggtgaactgcagtgctgtggaagacaaatgaagaaatgggagtattgcagacaagtgtccagctttttcagcagtctgcagcagcaagaggctgcagatcagggtttratagtgaaaagcctgaagaaggaaggaaaggaggacaacactaagcgtgaggatgagtaaatactgagaaaagatgtgatgaagggcaccgtgtgtatrtgaggctatakgtgaggtwcagagtatctagaaagttgtgtcaccttcacarcagggctgtcctctctcttcacatatttcatgtttcgatgtttaaatccactactgtatggaaactgagtccaagctgacaggaagccaatacaagcacagttcagactcatttyagcatctgggtacctctctgtattatacccacatcaatgttgactttcttrgctttgattatcttactactgactacatcatgaccccatctctcctgctcctatcctgcccagaggatgaggctccaatccc

SEQ ID NO: 93488 - DNA, 600 bp, Chicken  19866894412061_3
tcactccttagcagccgcagaagagtgctaacagtgtgacaggagtcattaacaacacacagccccacttagggcagcaggtggtgaactgcagtgctgtggaagacaaatgaagaaatgggagtattgcagacaagtgtccagctttttcagcagtctgcagcagcaagaggctgcagatcagggtttratagtgaaaagcctgaagaaggaaggaaaggaggacaacactaagcgtgaggatgagtaaatactgagaaaagatgtgatgaagggcaccgtgtgtatrtgaggctatakgtgaggtwcagagtatctagaaagttgtgtcaccttcacarcagggctgtcctctctcttcacatatttcatgtttcgatgtttaaatccactactgtatggaaactgagtccaagctgacaggaagccaatacaagcacagttcagactcatttyagcatctgggtacctctctgtattatacccacatcaatgttgactttcttrgctttgattatcttactactgactacatcatgaccccatctctcctgctcctatcctgcccagaggatgaggctccaatccccttcagctgac

SEQ ID NO: 93489 - DNA, 600 bp, Chicken  19866894412061_4
tagcagccgcagaagagtgctaacagtgtgacaggagtcattaacaacacacagccccacttagggcagcaggtggtgaactgcagtgctgtggaagacaaatgaagaaatgggagtattgcagacaagtgtccagctttttcagcagtctgcagcagcaagaggctgcagatcagggtttratagtgaaaagcctgaagaaggaaggaaaggaggacaacactaagcgtgaggatgagtaaatactgagaaaagatgtgatgaagggcaccgtgtgtatrtgaggctatakgtgaggtwcagagtatctagaaagttgtgtcaccttcacarcagggctgtcctctctcttcacatatttcatgtttcgatgtttaaatccactactgtatggaaactgagtccaagctgacaggaagccaatacaagcacagttcagactcatttyagcatctgggtacctctctgtattatacccacatcaatgttgactttcttrgctttgattatcttactactgactacatcatgaccccatctctcctgctcctatcctgcccagaggatgaggctccaatccccttcagctgacaaggwttc

SEQ ID NO: 93490 - DNA, 600 bp, Chicken  19866894412061_5
ggagtcattaacaacacacagccccacttagggcagcaggtggtgaactgcagtgctgtggaagacaaatgaagaaatgggagtattgcagacaagtgtccagctttttcagcagtctgcagcagcaagaggctgcagatcagggtttratagtgaaaagcctgaagaaggaaggaaaggaggacaacactaagcgtgaggatgagtaaatactgagaaaagatgtgatgaagggcaccgtgtgtatrtgaggctatakgtgaggtwcagagtatctagaaagttgtgtcaccttcacarcagggctgtcctctctcttcacatatttcatgtttcgatgtttaaatccactactgtatggaaactgagtccaagctgacaggaagccaatacaagcacagttcagactcatttyagcatctgggtacctctctgtattatacccacatcaatgttgactttcttrgctttgattatcttactactgactacatcatgaccccatctctcctgctcctatcctgcccagaggatgaggctccaatccccttcagctgacaaggwttcagcaggctgctggcactccacaccacagaaagg

SEQ ID NO: 93491 - DNA, 600 bp, Chicken  19866894412061_6
tctgcagcagcaagaggctgcagatcagggtttratagtgaaaagcctgaagaaggaaggaaaggaggacaacactaagcgtgaggatgagtaaatactgagaaaagatgtgatgaagggcaccgtgtgtatrtgaggctatakgtgaggtwcagagtatctagaaagttgtgtcaccttcacarcagggctgtcctctctcttcacatatttcatgtttcgatgtttaaatccactactgtatggaaactgagtccaagctgacaggaagccaatacaagcacagttcagactcatttyagcatctgggtacctctctgtattatacccacatcaatgttgactttcttrgctttgattatcttactactgactacatcatgaccccatctctcctgctcctatcctgcccagaggatgaggctccaatccccttcagctgacaaggwttcagcaggctgctggcactccacaccacagaaaggaacaaatttaacctcactcaatttttgctctttgctgagtaggaaatgcagcctacatgtgcacatgagcatgccacagagaaaggaggacaatgttsctctatactgctcaatg

SEQ ID NO: 93492 - DNA, 600 bp, Chicken  19866894412061_7
gaaggaaggaaaggaggacaacactaagcgtgaggatgagtaaatactgagaaaagatgtgatgaagggcaccgtgtgtatrtgaggctatakgtgaggtwcagagtatctagaaagttgtgtcaccttcacarcagggctgtcctctctcttcacatatttcatgtttcgatgtttaaatccactactgtatggaaactgagtccaagctgacaggaagccaatacaagcacagttcagactcatttyagcatctgggtacctctctgtattatacccacatcaatgttgactttcttrgctttgattatcttactactgactacatcatgaccccatctctcctgctcctatcctgcccagaggatgaggctccaatccccttcagctgacaaggwttcagcaggctgctggcactccacaccacagaaaggaacaaatttaacctcactcaatttttgctctttgctgagtaggaaatgcagcctacatgtgcacatgagcatgccacagagaaaggaggacaatgttsctctatactgctcaatgtgtgctcaacagagctgaactctgctctgcatctgcaaggtgcaacacggg

SEQ ID NO: 93493 - DNA, 600 bp, Chicken  19866894412061_8
gtwcagagtatctagaaagttgtgtcaccttcacarcagggctgtcctctctcttcacatatttcatgtttcgatgtttaaatccactactgtatggaaactgagtccaagctgacaggaagccaatacaagcacagttcagactcatttyagcatctgggtacctctctgtattatacccacatcaatgttgactttcttrgctttgattatcttactactgactacatcatgaccccatctctcctgctcctatcctgcccagaggatgaggctccaatccccttcagctgacaaggwttcagcaggctgctggcactccacaccacagaaaggaacaaatttaacctcactcaatttttgctctttgctgagtaggaaatgcagcctacatgtgcacatgagcatgccacagagaaaggaggacaatgttsctctatactgctcaatgtgtgctcaacagagctgaactctgctctgcatctgcaaggtgcaacacgggctgcaatgggagggatctgggasactttgtctccaaatttgcagctatcaaactgagtagaccttctgtacagcatttaagccagacagggaaccaaa

SEQ ID NO: 93494 - DNA, 600 bp, Chicken  19866894412061_9
cagttcagactcatttyagcatctgggtacctctctgtattatacccacatcaatgttgactttcttrgctttgattatcttactactgactacatcatgaccccatctctcctgctcctatcctgcccagaggatgaggctccaatccccttcagctgacaaggwttcagcaggctgctggcactccacaccacagaaaggaacaaatttaacctcactcaatttttgctctttgctgagtaggaaatgcagcctacatgtgcacatgagcatgccacagagaaaggaggacaatgttsctctatactgctcaatgtgtgctcaacagagctgaactctgctctgcatctgcaaggtgcaacacgggctgcaatgggagggatctgggasactttgtctccaaatttgcagctatcaaactgagtagaccttctgtacagcatttaagccagacagggaaccaaagcaggtggctggcatacttctaagctgatatctcccttgtcaagagacatttcattggtaccaacacggcagcgattcacttctcatttttgtccttacaaccatcagactcaggaacacttcacttctgctag

SEQ ID NO: 93495 - DNA, 468 bp, Chicken  19866894412068_1
ctgaagagttctgctccagcctctgctgcctcttcattagccctggtcccaacagaccgtgccctcgttttcagagcataaaaagcagaactggaaaggcacacagcatcaagggcagagggaaacaaccgtgaaatacaatgagctgcactagctaagattctcccatcatagttgtaaagcaacttgtgtgcttaccctatttcggacctatttgaagtccttcaatagctgttatagaatctcttcccattctcccatcacatcccataggcatcaggtcagcacaatacataaacrcaaggccacagcagaacaagcaactcaattctgccaatccccccataactcagtctcaatttatacaatgccagctgtcagttggatcacagtgttacaaccaacataaaaaaaagcaaggcccacctgcaatatcaccctcaaaaggagaggttggccctctcagtg

SEQ ID NO: 93496 - DNA, 600 bp, Chicken  19866894412075_1
tttagagatgaattatgcacatagcagtacatttaagaaagtaaatttgagggagttacagaattgagtgggccagctccactgggaggaagcagtgaaaatgaaaggggctggaagaaggctggaggatgctaactggagcagtgattaaagcagaataggtctgagttcctttaggaaaaatgaaaatgtaaaataaaattaaaaaaaaaaaagaaaagaaaaactcaaccctgaagaagaaaatccatgagaggaatgtggggagagcagcatttcacaggggaggactcaaccgtygaaagcagaaagcaagtggaaggaatgaagtataaagctagattagtgaacaagcggaggaaaacaagtgttgagcaagtggggtgttgtcatctggctgtcattgctcatccgagctgccagcctgtgccctaaatgctacaacctctgcaaactttcttgcctttgcaaatgcctcccagatcttagcttctgctctttgtgtactggctgaaggagacggtgaaggaactaaggagcataagtgatctgctgctttacttggaatgcagaggaaaaggagagcatgtgttatgaagg

SEQ ID NO: 93497 - DNA, 600 bp, Chicken  19866894412077_1
cataactcatctttcaaacagtcctaaccagaaaatctctaagaatgtcatattccttgtcacccatgcagtagattaggatgtttacttgctcttcatcagagatctctccttattacttctatgattaaaagtctgtagtgtctcagtgaagttaaaggatgaggttttgaaataattctactgctgaaatatccttattttgtcactacaaaaacaatcataaaaatataaagttgtgtatatttcttaagagaacaaagtaatcttttgttttcatacagtaatctgacagaatgygacagcaaggcagtcttccatgacaaatagacattattgcaagcccagctagaaaacaagccacacaactgacaatgttgcattttttcaacctgcagtctgaagcatattcttagatttgataggaaaaaagaaatactagattttacattgattatttcttttttttttttttttttgaccttaagctacttagaacattgcactgcattatttcagattgctgtagcaatcaaccaaagacaatacaatctcaaagtacagataacaggcaaataattctttaagctgaaactaaat

SEQ ID NO: 93498 - DNA, 600 bp, Chicken  19866894412078_1
gagaaaaataagaagttgttaagatagtatagtagttttcaaatcttcagttcagctccaatgcactgaggaagtgatctgagaacttaaaaagaatggagtgaaagtactgtgttatttcattgaaattcacacaagcctttatcatttggtaacttgtatatataaagagtttataaaataatagttcatatccttttgacacaaaatctagacttctcgtactgatttctggtatgcacagacctattgtgcaggcatggtgtggtactaagattacacactgtagtgttattcacrtatgcaaagtcccactgacataataggcaggggagagtacggtttaatgtatctataatccacatattaaagctcwctaagtatgatttgacatgacagtccataatacctcagagctttaactgtttgtttctgttgtttctgtgacatataagccacaaattacagcattggaatgtctcatgatattccatttgtaatccatattcttcgttacatgtattatacagatacatatgcatatatatttgtgcatttctaaaacttttcattatctacccacacaggatgggaattcag

SEQ ID NO: 93499 - DNA, 600 bp, Chicken  19866894412078_2
atctgagaacttaaaaagaatggagtgaaagtactgtgttatttcattgaaattcacacaagcctttatcatttggtaacttgtatatataaagagtttataaaataatagttcatatccttttgacacaaaatctagacttctcgtactgatttctggtatgcacagacctattgtgcaggcatggtgtggtactaagattacacactgtagtgttattcacrtatgcaaagtcccactgacataataggcaggggagagtacggtttaatgtatctataatccacatattaaagctcwctaagtatgatttgacatgacagtccataatacctcagagctttaactgtttgtttctgttgtttctgtgacatataagccacaaattacagcattggaatgtctcatgatattccatttgtaatccatattcttcgttacatgtattatacagatacatatgcatatatatttgtgcatttctaaaacttttcattatctacccacacaggatgggaattcagataattccttccagtctttagttacccctgctgtgcctatgtgttgaaattaggtaatctcgaacggctgtagaat

SEQ ID NO: 93500 - DNA, 599 bp, Chicken  19866894412079_1
  misc_feature (1)..(94): n is any nucleotide
nnnnnnnnnnnnnnnnnnnnnnnnnnnnnnnnnnnnnnnnnnnnnnnnnnnnnnnnnnnnnnnnnnnnnnnnnnnnnnnnnnnnnnnnnnnnnnatatttcctggataccaaatacatttttcgaaattatttcagctatctgccttcatggagataatgagaatgaaattgttgccatgagcatacacgcctcccataagtcacacggaaattgaacgttacagaatcacacagacacagcatggctgagacactctgaagtgccatgtagagtagattactcagggctgtgtctggcyaggttttgaatatatgtatggatggagacacaaaaacttctctaggtaacctgtgccattattcaggcgctttcagttaaaaagttttttctayatggttgagtcaccattgctggatgtgttcaaaaaccgtttggatgtggtgctcagggacatgatttagtgaaaggttagagttagggtagtatggttaggttgtggttgtgaytggacttgatgatctttaagatcttttccaagctaagcaattctatgattctatgattctaatagaatctcctgtacatgacttgtcctgt

SEQ ID NO: 93501 - DNA, 600 bp, Chicken  19866894412079_2
atatttcctggataccaaatacatttttcgaaattatttcagctatctgccttcatggagataatgagaatgaaattgttgccatgagcatacacgcctcccataagtcacacggaaattgaacgttacagaatcacacagacacagcatggctgagacactctgaagtgccatgtagagtagattactcagggctgtgtctggcyaggttttgaatatatgtatggatggagacacaaaaacttctctaggtaacctgtgccattattcaggcgctttcagttaaaaagttttttctayatggttgagtcaccattgctggatgtgttcaaaaaccgtttggatgtggtgctcagggacatgatttagtgaaaggttagagttagggtagtatggttaggttgtggttgtgaytggacttgatgatctttaagatcttttccaagctaagcaattctatgattctatgattctaatagaatctcctgtacatgacttgtcctgttaccggacacctctaagagccttgtgtccatcttctttgcactcttccattcataaaaatggatgaaatcctaccctcccacttagccttctctt

SEQ ID NO: 93502 - DNA, 595 bp, Chicken  19866894412079_3
gaaattgaacgttacagaatcacacagacacagcatggctgagacactctgaagtgccatgtagagtagattactcagggctgtgtctggcyaggttttgaatatatgtatggatggagacacaaaaacttctctaggtaacctgtgccattattcaggcgctttcagttaaaaagttttttctayatggttgagtcaccattgctggatgtgttcaaaaaccgtttggatgtggtgctcagggacatgatttagtgaaaggttagagttagggtagtatggttaggttgtggttgtgaytggacttgatgatctttaagatcttttccaagctaagcaattctatgattctatgattctaatagaatctcctgtacatgacttgtcctgttaccggacacctctaagagccttgtgtccatcttctttgcactcttccattcataaaaatggatgaaatcctaccctcccacttagccttctcttctccaggttgaacagccacagctctctcagcctcccattgaacaaaagatgctgtaatccctcaaggcctttcgcaggagttgctccaacgtaccaatgtctcactttt

SEQ ID NO: 93503 - DNA, 600 bp, Chicken  19866894412084_1
ctctcacctgctagaacatcctgtgctgatgcccacccatctcagctggcattccctcttcattctgagcctgttatccaacacagcctgatgctttccaggatgctctgtgaaacaaaatgctttcttgctttccagcagagctgctctgcttgccatgttgcaggagcagcagagaggaagcgttctgcagcgtctggatctgctctgtgcaggggggaagcactgtggatggctgtgctgctgctgcaagccctcagccattgggattgttcctcagccctttgcttcttctgctcrctgttgagctgtgcaggaagcagctggttggataaagggagctggcggggcgctggtggtattgcagggtcccctccagcagtgtgacaattagcatctgtgaagaatgaggatgcagagttcagaactccagtttcattcgtgagagcagcccttggagagctggctggaaaacctccgccttgtgtcatcctttagggaagattgaataaacttcctgtttcccagagagttctattaataaaagcattcttttttccttccctgtccttagccaataatgacactcagacatgtggg

SEQ ID NO: 93504 - DNA, 539 bp, Chicken  19866894412097_1
ctgtgtatcggtgctgcacaaagatactagaaaaattagaaaaccttactctttattgaaggacatgaaaaatcataaggaactggtagatgagctgtggaataagtaatgactctacgtatccaaggatttccctatttctcaaagccttcagtattaaagctttgaacattcccctaaactctaacttccagcagctgcccagagagctccaagtatatgagaaatatctttatctttttgccactcacactcagtatttcctttatgatctccttttcctcttttccaagcacattyaaggtttattaagccaaactttgcattgtgacgatcagaagcaacatacagcaaagcatatgtagacttagtacaataccttttgattttggttgttgtaatgctggcctggaagggctgttgcatagcctgcacagtgctgggaggaaaaggagacactattcttttttctaacatttctctgtagagacatcaggcttaatctctatttcatacaaacattttgtgcatgctttatt

SEQ ID NO: 93505 - DNA, 599 bp, Chicken  19866894412105_1
  misc_feature (1)..(251): n is any nucleotide
nnnnnnnnnnnnnnnnnnnnnnnnnnnnnnnnnnnnnnnnnnnnnnnnnnnnnnnnnnnnnnnnnnnnnnnnnnnnnnnnnnnnnnnnnnnnnnnnnnnnnnnnnnnnnnnnnnnnnnnnnnnnnnnnnnnnnnnnnnnnnnnnnnnnnnnnnnnnnnnnnnnnnnnnnnnnnnnnnnnnnnnnnnnnnnnnnnnnnnnnnnnnnnnnnnnnnnnnnnnnnnnnnnnnnnnnnnnnnnnnnnnnnnnnnnncataaatgaggatcacttgaatgccatcatcaagcaggtatgtagttgyttttttttaaatagggtcttcattttctaattcataataattgccaagaagctagggccaggacatgacattttaatgccacgtgtttgcaggtgcactttgacatcacatctgtagcaagaaagggcatctcccttctcagacccgttttctttttagggtcttaaaaatgtcagtaaggggaataaatatgaaggatctgtcctaaggaactctgcttacaaggaagtaactttctttgacccctggattggcaaacacagaccttgccaagaaagtggaacacgaagccccaatta

SEQ ID NO: 93506 - DNA, 600 bp, Chicken  19866894412105_2
aactttctaccttatggtctacatccagcataacaaaaggaaagtgaagtcaatggtctcagctcggtgcacataagtgctggacaaacagcaacttattccagtacagaaaggagaagaatgttcctctgttgccctttttattatcctcgttacgaattttcattgccgaaaggtaagttacaaagttaaattttagcagtgatgaatgcattgtttcttctcatgcttcttgatatacattcattggctgattcatagatctggttctctgccagctgttcaaaaggtcaggcaggrgtgtgtgtgtgtgtgtgtgtgtatgtgtgtacacttrtcttttccccatcacygttcatctgtcctttctgatgatatacctcatagatctcactgattatggaaatgtgaatcatgttggaacagcagaaatcagggtttggcttccaacaaaggtcaatacgatgcatattaactgtgattagaaaggcacactgtagccttccagtgctacttgctttcagattgttcttattattttgtaagctattgccagaagtgaggaaggcagattattgcttttttcttacttaaatgaga

SEQ ID NO: 93507 - DNA, 600 bp, Chicken  19866894412105_3
aggaaagtgaagtcaatggtctcagctcggtgcacataagtgctggacaaacagcaacttattccagtacagaaaggagaagaatgttcctctgttgccctttttattatcctcgttacgaattttcattgccgaaaggtaagttacaaagttaaattttagcagtgatgaatgcattgtttcttctcatgcttcttgatatacattcattggctgattcatagatctggttctctgccagctgttcaaaaggtcaggcaggrgtgtgtgtgtgtgtgtgtgtgtatgtgtgtacacttrtcttttccccatcacygttcatctgtcctttctgatgatatacctcatagatctcactgattatggaaatgtgaatcatgttggaacagcagaaatcagggtttggcttccaacaaaggtcaatacgatgcatattaactgtgattagaaaggcacactgtagccttccagtgctacttgctttcagattgttcttattattttgtaagctattgccagaagtgaggaaggcagattattgcttttttcttacttaaatgagaactgagtgcaagtttgaccataagttctaaaaccagg

SEQ ID NO: 93508 - DNA, 600 bp, Chicken  19866894412105_4
tggtctcagctcggtgcacataagtgctggacaaacagcaacttattccagtacagaaaggagaagaatgttcctctgttgccctttttattatcctcgttacgaattttcattgccgaaaggtaagttacaaagttaaattttagcagtgatgaatgcattgtttcttctcatgcttcttgatatacattcattggctgattcatagatctggttctctgccagctgttcaaaaggtcaggcaggrgtgtgtgtgtgtgtgtgtgtgtatgtgtgtacacttrtcttttccccatcacygttcatctgtcctttctgatgatatacctcatagatctcactgattatggaaatgtgaatcatgttggaacagcagaaatcagggtttggcttccaacaaaggtcaatacgatgcatattaactgtgattagaaaggcacactgtagccttccagtgctacttgctttcagattgttcttattattttgtaagctattgccagaagtgaggaaggcagattattgcttttttcttacttaaatgagaactgagtgcaagtttgaccataagttctaaaaccagggcattcacaaatgcaa

SEQ ID NO: 93509 - DNA, 599 bp, Chicken  19866894412106_1
  misc_feature (1)..(103): n is any nucleotide
nnnnnnnnnnnnnnnnnnnnnnnnnnnnnnnnnnnnnnnnnnnnnnnnnnnnnnnnnnnnnnnnnnnnnnnnnnnnnnnnnnnnnnnnnnnnnnnnnnnnnnnttctgtatattcagcttctactgaatacactgaaagagcatcttgcagggtcgtgcttctgagcatcagcttcatctctactacagtcctcagcatcaagtttcttccaaagtacttattaaattttcaaatttcttttgaacttcatgtttatatcttttttttcccctaatagtgctgctgcctgatcatcacasgctgatagagtatacaacaaggaagcaaaatcacatgaaaagaagagtaattgaaattttattctgaaaatggtttcatggcagattacttactgggccttttcctaatttgtggtagtgcaagaaagtacagctgcagggaacatgtaatctaattgtccttaccacaggagttaggaatacatctaatcccattttccctgatcacagtagagtatggacaccatactcaggtaacacctgatgaaggtctgagtggaagggaaagtgctctccctggtgccaggatacctgtctgt

SEQ ID NO: 93510 - DNA, 600 bp, Chicken  19866894412106_2
ttactgggccttttcctaatttgtggtagtgcaagaaagtacagctgcagggaacatgtaatctaattgtccttaccacaggagttaggaatacatctaatcccattttccctgatcacagtagagtatggacaccatactcaggtaacacctgatgaaggtctgagtggaagggaaagtgctctccctggtgccaggatacctgtctgtactgtgccctctggtttaaggtagcactgttctctaagattccaaggtgaaagccacaaatggttttgatggaactaaaaatatctttayaaaagtctctttataccttaaatgagttggcatgactccatcacagtttgctgccaatgaatctctttaccctaatgcaaatggcaaatcctgcaccgttcattatgtgaaggggatgtttccaggcagttctgctgcccatcacatctgcacagctgtcgaggaatagaatctgggtccagattcacctcagagcaaccagcataccctagaacaggtacactatctaggatactgttcatcctgtttttctagctgatgccatttgctgtgtgacaactcttttcacttccatatttt

SEQ ID NO: 93511 - DNA, 600 bp, Chicken  19866894412118_1
ttttgacttgctttctgcttgaagctgtactgcatttccttgatgggtgcacacggatgtcatgcagatgtggtcacagatgctcctcaggtgcaggtaggtcacacctgggtattttcctcctatgtggtggagaagctgaatggaatgaaataagtttgacatgacacatccacattttgttttcacgtaagccttgtatcctttttggaagtaggtgtgttatttgccactgtgacattacatattattacatgtcattgctgaagcaaaaaatgggaatattttgcccaaacagtrtgtgaaaccacctcacatttaaaaggaaatatgtgcatggccgttgccttgacaccttgaatgttgtgctctggctgccctgagcctccacatccaccatcagcttgtaattctgcagtaatgtggagtgtcagtagacaaatgtgcagggattatgaaaatggatcatatttcatcattacatttttactcaaacacaataacaatatattctgtaactgagctctcggtggtgttgacaacatcctttcctgcactcagagctgtgatacagatgcgttatttcctccagcaaatctt

SEQ ID NO: 93512 - DNA, 600 bp, Chicken  19866894412127_1
cactgataacagtgtcacatctaaggagctcttggctcagcacagccacatgcctccaacactcccaacaagacactgctccatctccactcataggcacaagcatagtcagaagctcacatccccccaggtccttcgggcagaatctttattttgtagttctcgtcccagcaacagtaaccattgcttcacaacttccttctatgctctgcagtaggtggacaaaacactttctctcatcgtgtgatgctgggagacagaaggcctctcttttgccagagtctacaaaatggtggtctsagcagtagggagaaaatagcttttcaggctgctgagtttgctggcatcagcaaatgttcacttacagaatgagactgctccagaacgctgcaggctgatggcagctattttctgcatcagctaattgggtatgggagtcccacctggtacacaacacatttccagagtaaacattttccttccccctatttttaaaactgttccttaaacacgtacatgatgtgagctccttccccactaaataattttgcataggaaacyctaccaagccatggtatgatggaaattttggggctctgc

SEQ ID NO: 93513 - DNA, 600 bp, Chicken  19866894412127_2
aggcctctcttttgccagagtctacaaaatggtggtctsagcagtagggagaaaatagcttttcaggctgctgagtttgctggcatcagcaaatgttcacttacagaatgagactgctccagaacgctgcaggctgatggcagctattttctgcatcagctaattgggtatgggagtcccacctggtacacaacacatttccagagtaaacattttccttccccctatttttaaaactgttccttaaacacgtacatgatgtgagctccttccccactaaataattttgcataggaaacyctaccaagccatggtatgatggaaattttggggctctgctgagctcatttggctcatggcaacagtgagtctatcctcatgtgacacatggctgcatggtcacacctcatgcaaatgaagtcatggctgagcacacaagacaacatggaactcaaaataaatacatgttcttggccacaaggaaaactggtactttaaaaactgcaggcaatgggtttcattcatttactgaatttttttggcaatgaaatacatacttgtgtttttttgtacatagtttcacctcactgtaaaatgatg

SEQ ID NO: 93514 - DNA, 600 bp, Chicken  19866894412135_1
ggaatgactgcttggattatagctagtttgcagttgtgtgggactccttgtagtgagaagtgagcgtttgttcacgatgatgaaacgcttttttaactgctaactgttgttatagctctgaatattcccatgcagtcattgggtgctaaaaccattttatatatgtttgggatcgactgcatggaagaggagctggttgtgcttcatagagggaggagaccaaaccttttcttctcggttacagaaaacctaacccacatcctttttcctctcgttggcaaaaatttggcttacgtcatkaagatggagggtttccccccctgctcttgctcccatcctataagacatactttatttgccttttgccctcttttcgtggagctcctctcagaacctgctttgggggggggctgtgctttaatcattgctaaagatggctcctgctttccacagtggtgtggcccaaatagacatgtgaaaagaccccattactgagctgtaaaagaatactgtaaatggattatgcagagaaaaccatttagataaaaatgcaattttccctttcacacacactgctaagaattaatagcacattctttc

SEQ ID NO: 93515 - DNA, 600 bp, Chicken  19866894412147_1
aagatcagttctagttgtggttgtttcatgaagatgttcacctttattagctttcagtgcaaatggtccgtgcaaatattttaatgttctctttccttgactaaatagttgaagactacaccaaatttattaatattattattttgctaatgctctatattccatatttgatagtaagcagtttcacatctgtggctgaatgatagaagctaaagctgatatggattttctattttccatcactccatatcatttgtaaactctttagttctgtaaaagatctgctttaaataaataaaygtatcctgactaatcctctttgaataagtggaaagcatttaatcccatgattctgtaaatccagggtagctgtcaaattgtgtgttcatttttctgtattatctaaatcggtttgtatcagatctttcattgacaacaacagtttgttatttggattaaacacctctcgtgctctataacctttcatttaagagtcatttgcatccctttttttggctgctacttcaatcatctgttttttaaccgttctttaggaatatttgctgctaaatattcacactgtgtctaatttatttattt

SEQ ID NO: 93516 - DNA, 599 bp, Chicken  19866894412148_1
  misc_feature (1)..(92): n is any nucleotide
nnnnnnnnnnnnnnnnnnnnnnnnnnnnnnnnnnnnnnnnnnnnnnnnnnnnnnnnnnnnnnnnnnnnnnnnnnnnnnnnnnnnnnnnnnnnctgcatctacattgcatgtttctgtgtgcatgcacgtttggaaggtacagattttactgaaacgctgtggcatatctatataatgcgttaaagtagtgcattagagtatgggtgggaaaagcagtgtagattagtatgaagttatccacagctccttaatttttccattaaaatgagtgagaataaagtcagaaaagctgagcatgtmgcacaatctgcaatagaaaaagtttcgtctgagtactyctttgcatatagcacgaagagagcagaatcaggctctcctccttcttgyatactaccttctgcaaaccagtagcttgaaattctgcttttagcaactaacatgcacatgcagtgtgggtggaaaggggatatcgaattaattgaaccaggggttgtggttcacgtcatgaaataaaccagcttgctttacagatttcatacagcagctgtaacagaggaagcgagcttgccaatagcaggagctaatgcttcaataccttt

SEQ ID NO: 93517 - DNA, 599 bp, Chicken  19866894412148_2
  misc_feature (1)..(54): n is any nucleotide
nnnnnnnnnnnnnnnnnnnnnnnnnnnnnnnnnnnnnnnnnnnnnnnnnnnnnnctgcatctacattgcatgtttctgtgtgcatgcacgtttggaaggtacagattttactgaaacgctgtggcatatctatataatgcgttaaagtagtgcattagagtatgggtgggaaaagcagtgtagattagtatgaagttatccacagctccttaatttttccattaaaatgagtgagaataaagtcagaaaagctgagcatgtmgcacaatctgcaatagaaaaagtttcgtctgagtactyctttgcatatagcacgaagagagcagaatcaggctctcctccttcttgyatactaccttctgcaaaccagtagcttgaaattctgcttttagcaactaacatgcacatgcagtgtgggtggaaaggggatatcgaattaattgaaccaggggttgtggttcacgtcatgaaataaaccagcttgctttacagatttcatacagcagctgtaacagaggaagcgagcttgccaatagcaggagctaatgcttcaatacctttcattctctactctgaaaaggaaacctcttcttaagctc

SEQ ID NO: 93518 - DNA, 599 bp, Chicken  19866894412148_3
  misc_feature (1)..(5): n is any nucleotide
nnnnnctgcatctacattgcatgtttctgtgtgcatgcacgtttggaaggtacagattttactgaaacgctgtggcatatctatataatgcgttaaagtagtgcattagagtatgggtgggaaaagcagtgtagattagtatgaagttatccacagctccttaatttttccattaaaatgagtgagaataaagtcagaaaagctgagcatgtmgcacaatctgcaatagaaaaagtttcgtctgagtactyctttgcatatagcacgaagagagcagaatcaggctctcctccttcttgyatactaccttctgcaaaccagtagcttgaaattctgcttttagcaactaacatgcacatgcagtgtgggtggaaaggggatatcgaattaattgaaccaggggttgtggttcacgtcatgaaataaaccagcttgctttacagatttcatacagcagctgtaacagaggaagcgagcttgccaatagcaggagctaatgcttcaatacctttcattctctactctgaaaaggaaacctcttcttaagctcattcattttccagagggaaaatcgaatgctgtggcatcttgtcagagct

SEQ ID NO: 93519 - DNA, 600 bp, Chicken  19866894412156_1
aggaagactgtaacctgggcaataattaaaagggttcaagaaacgtctaatgaattactaaggggaatctttcaactttcaattactgctgagcaaatacagtacatctttagatcaatttacaaaaaaaaaaaaaagcatacatttcagtacagttgtataacgtgggatatttttaatcccacagagtatctacaaaaagggattaagagcaagagcttgggccattatggcaaaaaaaccaaattattgtaatctgatcttttaatatattttagagataagacaaaaacctcaaargtgtactatttttttttcctaaaagttactaaaagtaacatctaacacttattaaacattttgctatatatcactgctgtattccactgctgaaaccatcaactctaaaaaggcctcttataatagttccagctatggttctggtaaaattgacatgaaagaaaagacaaggagtgctatttctaattcatttaagcttggttgaatgaaaaacagaactaaaaataaatctgtttcacattcccatgttccatttggcatttagaatgctttacacaatattcaaaagtcttatttaat

SEQ ID NO: 93520 - DNA, 600 bp, Chicken  19866894412157_1
agcactgagcagaaccaacccctctactcaacagctgttttgctggcagactccagggacaccttttattgcaatcccataaagaggtattaaaagcaacctcaggagacacttgctctttcttgaatagtcattattagtaatacaaacgtcatttattatggtgcaatggatggaaacactgttgacaaaggaggcgctccctgagtcctcctctgcaggtaggaagacactcctgagctatgtgcttccttcctgcaggagaaatcacacactgaatgtacagtacttgatcagcaragaactaaaaccaaggcagtcagctttgatggtactttgtatgaggggtactaaaaggaattattgttttggtctgtttcgatgagaaaaagcattgatgccacagtatacaggagtgagagccacttacataaacagcgatgctacaatgagttcatttgattacaggacagaggataaacaaagcaggctaattgtaatagaaaagaaccaagtcatgaagcccaatcctcccacaaaagcaacaagactattattgttgctgctataaaagttcttggactatttcagagaaataaa

SEQ ID NO: 93521 - DNA, 600 bp, Chicken  19866894412168_1
tcaccttagctcagtgctgtgctctgcactttacattcagctcacgaaagttttgcttcctagcgctgggtctgatccaagcagtacatgcacaaaaagtcaccgtttgctttccacgccacattctctctgctacaaacacagacctccctgctttcttgtggcagcaatgatttctgctgctcactcgcttctctttgtgccagggaaatttctagtgggcttcctaatcagaaagtgtgctggtgttaattgcaaggacagcacgctctagcgctgctctaatccaggtggtagaaraaggtccaagctgccttggtgcagcaggttccaggttacatggaggtgagcgttgcaggagcaggggggtcaggtcagatggacccaggggtgtcttggatgttagaagaccgtgtgcagggcccactccacctcatgtctgacctgctgtggttgtgcggacttctatccacgggcagctgtgatgtagccacccctaggggatgtcagcgtgatgtgggacagacaaggccagatggggctagttggctctgggaccaaagccattgctcagcgtctgatttcagggctggcggagat

SEQ ID NO: 93522 - DNA, 600 bp, Chicken  19866894412170_1
aggtctcttcaaatcctttatcaatgacagcccatgcacaaccagcacagatttatgtaacctttaatcatattactgtaatttattaagtctgtattcatatgaacacaagaggtttgacagttactcagtggaaaaagtaaagtttattgctcaaggtaaactaaagagtgagtgatgagaactaatagctttgttatatactaaaccccaaacataccccttgccacattaaaaacagggaagcaaggaacgagggcgttctaacagctaccacaagtcactgacagtgaaaacagmagctaaaagccacatctgctgctaatactatgatcctggatgcattccctaccatcatctttctccccaaaagctcaattgcaaggtcttctatgcctctgaaatatgaagtgttgtcttatgaatgaaacagaaaaggaagaatgggtaaggctaggtgtgttttcttaagtcatttcaggtttgaaaaatatggattttaaataataaaactttcgatttcttcttccacatcactatcccttcaaattaaaattaagtcaatgatgaaataaacactactccttcacaagaactaca

SEQ ID NO: 93523 - DNA, 600 bp, Chicken  19866894412179_1
atttctatgctgtccttcatctccttaaatatgccataccaatcaaattcatagatcatgagaagacagctttgcacattctctctcaggttcctggcctgacagaccattcttgcattgatgtttgctttctttgaccagaagttacttctctcttactgcagttctacttttagcccctattcttcagcagaacccatttccctgtaaaccatctatgtccagggaagcaatgggaatcaccaattcctccgtttctctgtttgtgatagatatggataccaaaattctgtgcaacargttcagagtaagcagggaaccccgagggaagcagctgtgactctggagccccaggatgatgttagcgagctcctctccaaaccagatcagatggatcttccagtgcccacccgtggactgggatggtgccraaatgttcctcagtgagaacagtggtgggaggaaataggcagaggttgcttacacagtaaaaacgtctaccacaagaaatttaaataggtctcttttcactttcttcaaatgataaatgagaataatttcacgttaacagctacagggtctgctctactgtagatattc

SEQ ID NO: 93524 - DNA, 600 bp, Chicken  19866894412179_2
ctttgaccagaagttacttctctcttactgcagttctacttttagcccctattcttcagcagaacccatttccctgtaaaccatctatgtccagggaagcaatgggaatcaccaattcctccgtttctctgtttgtgatagatatggataccaaaattctgtgcaacargttcagagtaagcagggaaccccgagggaagcagctgtgactctggagccccaggatgatgttagcgagctcctctccaaaccagatcagatggatcttccagtgcccacccgtggactgggatggtgccraaatgttcctcagtgagaacagtggtgggaggaaataggcagaggttgcttacacagtaaaaacgtctaccacaagaaatttaaataggtctcttttcactttcttcaaatgataaatgagaataatttcacgttaacagctacagggtctgctctactgtagatattcctgcataccttccattagcgacctcaataggagcagcggtggatgtcaaagacaataaaacctttaaagcctgccataatctgccttttccccctcattatgcacacacacacacaccatcagtactactg

SEQ ID NO: 93525 - DNA, 600 bp, Chicken  19866894412189_1
gcagtaagatctacgtaacctgaaaactccaaaatctcctgaaagttttttggtctgtccccacagtgtgtgggcatccttcagaaggctgagcaacattataacccaaggcacattcaaaagaatccctgcaacacccttcagtgacaatcagcaagatcgcttgaatattgaagagtaatttcagattttcccctaatgttcattaacacattattttattttttcctaaaattaccagagtcgactaggaaaagtagaacagaagccttccttcttcgtctgttagagaccctttgyttgaaagtaaaaagacaaagaagcaagtgcacagaggctgstgarttgcttgctcaactgacatatagttctccttttataataatttccgatatcaaagaaatagagttatatattgatatataattcaggagattttatatttttcaattaaatgtctttcaacctttgctctttaaaggttatagaaattcatgattttagcctctcttcggagatcctatctttagtcataaggtcaatcaaattccccttttcaaatgttacatctttaaagaatatggtaaccagaacaaaaac

SEQ ID NO: 93526 - DNA, 600 bp, Chicken  19866894412189_2
aaagttttttggtctgtccccacagtgtgtgggcatccttcagaaggctgagcaacattataacccaaggcacattcaaaagaatccctgcaacacccttcagtgacaatcagcaagatcgcttgaatattgaagagtaatttcagattttcccctaatgttcattaacacattattttattttttcctaaaattaccagagtcgactaggaaaagtagaacagaagccttccttcttcgtctgttagagaccctttgyttgaaagtaaaaagacaaagaagcaagtgcacagaggctgstgarttgcttgctcaactgacatatagttctccttttataataatttccgatatcaaagaaatagagttatatattgatatataattcaggagattttatatttttcaattaaatgtctttcaacctttgctctttaaaggttatagaaattcatgattttagcctctcttcggagatcctatctttagtcataaggtcaatcaaattccccttttcaaatgttacatctttaaagaatatggtaaccagaacaaaaacaatatcctaagtgaggtcagaagatttcccaaccttcacat

SEQ ID NO: 93527 - DNA, 600 bp, Chicken  19866894412189_3
ttttttggtctgtccccacagtgtgtgggcatccttcagaaggctgagcaacattataacccaaggcacattcaaaagaatccctgcaacacccttcagtgacaatcagcaagatcgcttgaatattgaagagtaatttcagattttcccctaatgttcattaacacattattttattttttcctaaaattaccagagtcgactaggaaaagtagaacagaagccttccttcttcgtctgttagagaccctttgyttgaaagtaaaaagacaaagaagcaagtgcacagaggctgstgarttgcttgctcaactgacatatagttctccttttataataatttccgatatcaaagaaatagagttatatattgatatataattcaggagattttatatttttcaattaaatgtctttcaacctttgctctttaaaggttatagaaattcatgattttagcctctcttcggagatcctatctttagtcataaggtcaatcaaattccccttttcaaatgttacatctttaaagaatatggtaaccagaacaaaaacaatatcctaagtgaggtcagaagatttcccaaccttcacatatat

SEQ ID NO: 93528 - DNA, 599 bp, Chicken  19866894412202_1
  misc_feature (1)..(52): n is any nucleotide
nnnnnnnnnnnnnnnnnnnnnnnnnnnnnnnnnnnnnnnnnnnnnnnnnnnntagatttgaatgctatgatttttctcgttactcagctaaatagctcattatttgtatttaattccatttctaacatttacatggattgcataaaattaatgaatttttaaaataatacaattgtgatgaatgtatgttcaaccttactagccattacatgggctagttttccatggtgccaaataaccaaccattatttattattcagcttcatggatttattctaatttatcaaaagtgtccccccmaaaaaacaggttctagtatactaattcagctgtagttgtgcattacatctgcagcttatccaagttcaaccattctgttttgactgtgaaggatcaaagatcattgtccctgccacgtagcttgtgtgtgtacatgtcatatttgtgatcaggacaacagaggttgtagagcaagccatagactagttttgccccactgtctacacaatcacagaattagtgatagaactatgaatacttgtgtcatccagtatatcctagaaacagaagtaacttaagcccgcaatgaacactgaaaa

SEQ ID NO: 93529 - DNA, 600 bp, Chicken  19866894412203_1
ccgggtacagtcggtcttgtgcttgttttctgtttttttttctccccaaacaagtcttgaaatcaaaggagagtgcttccaagctaaatacgagtggggagcaattgagtgcttaatggagtgggtattggtcaggacatcacataagggaaacataaatcgtggttaaggatgcgtgtaggcaaggagggagggaaggagaagaggaatgaactcagcatcccaaaggaaagggagtctggcagcgtatagctcatgggacacgggtagagggaggagtgcaggacctgtagcaaaggsatacaaacctttacagcagcaccgttttgccaggtcggctggaggagcaaacctgaggcctccagatgtgcaagcagcagctggggatgtgttaacccagaagggctccttccctgtgtccccagagccacctgctgccattggggctttcccaggagatggcggtgctccttcatcccctgaaggccaagggttgggtgatgcttgacgttgcactgccactgctacttcaggctggagataagggaaaagctttccaccatgagcaatatctgtcgttggaggtttccaagacccacg

SEQ ID NO: 93530 - DNA, 600 bp, Chicken  19866894412205_1
tgtgagattcaggaccaagcactgccaacagcaaaggcttccgggcaagggttttattagcatgcatctccccacaacgacagcttgtaagcaagaaaaagcgctgcctgatcacacttccctgagcccagagggagttaacacatgccagggtggagggaacgcatgcattcagcaccgagttttgcaagcctttaacattcatgttctgctgcaacaagcaggggaatccaaattgtgattattttgctttcccaagtttctaagtctttcagctgcaagagtaattataaggcaggyagcagacctgcactcagtacatacctgcctggaataaaattaactttgccttttgtatttaagcagaaggaatataattatgttactacttgtagtgagaaattatgggttactcctgctaacaagtatacgaggggcacagcggagtctacgcatgaccacaaagctgtatttctgtgatacagagggcacactagctgtacagacatttaaatgtgaaggtactaatggcttgctagcagagttaggagaaggctcagaatctatctgctgactttccttcactagctctgtaagaga

SEQ ID NO: 93531 - DNA, 600 bp, Chicken  19866894412205_2
tacatacctgcctggaataaaattaactttgccttttgtatttaagcagaaggaatataattatgttactacttgtagtgagaaattatgggttactcctgctaacaagtatacgaggggcacagcggagtctacgcatgaccacaaagctgtatttctgtgatacagagggcacactagctgtacagacatttaaatgtgaaggtactaatggcttgctagcagagttaggagaaggctcagaatctatctgctgactttccttcactagctctgtaagagagttaaactatcaaagayttttctatgcaatgtttaggtgtctttttccaaaagatagagttcaactgcgtaactcactgccacaggatgctaaaaatatcaatacgtaaatgcaaagtcaaatgcaacctactttacagtaggaggagagttctgaattcaccatattcacagatgttagaacttgtcacaaagataccctatataaactgaaagagccaataacatcccaggcttctaatattatgccaaacaccttctccagcacatcagctcccggtccagtggcttgtcagttttcattgtgtgtctcccaag

SEQ ID NO: 93532 - DNA, 600 bp, Chicken  19866894412205_3
gaactctgccatgttctcaacaattgctaagaagaaaggcacagaaaaacatccattttttccccccgcctgcatatcagctcagacctataccaacacagctttggcaggtccttcctgctcttgtcaaaatagcatatttgcaaaatcacctttttgagtgagacttaagctcaggtaaataatactgttccagtttttacactgccaacacagtccatcttcagacaacatgacaccagctcctgctggaagatgcctgagataccttccctttaactgaaggagcaattctcatcrcagagaactattttaacaagattttgctgctgctgctgtgcaggatcacaagtccaagccctttgcttccagtctctaactcattcttccagttcccagcaacagcaaggaatcagagggattacagtcctgaaggactggaaggtgtggatgatggcgtgctaacaacagaaacatactgcaaaacagttactgtgctgtgcaaaggctggtgaacagaggggtaaggatgtacttgtatgaattacaaaagttttattatctaaaagttaaatatattgctaagacatatacggctct

SEQ ID NO: 93533 - DNA, 599 bp, Chicken  19866894412215_1
  misc_feature (1)..(208): n is any nucleotide
nnnnnnnnnnnnnnnnnnnnnnnnnnnnnnnnnnnnnnnnnnnnnnnnnnnnnnnnnnnnnnnnnnnnnnnnnnnnnnnnnnnnnnnnnnnnnnnnnnnnnnnnnnnnnnnnnnnnnnnnnnnnnnnnnnnnnnnnnnnnnnnnnnnnnnnnnnnnnnnnnnnnnnnnnnnnnnnnnnnnnnnnnnnnnnnnnnnnnnnnnnnnnnnngagcactcgtatctgtttgggagcagtgccgtaaggacgggtgcagaatgcagggtctgacccagccctgggcacggccacactgcccactsctgccaacrcccgtcctgyacagctcctgcccagagctcgtccttccctgcaggagcctccggcmactccasgtggcagaacgtgatcacayagcactacaaatgtgagtcaacatcactgtttaacttccatgtgcggagctgtgttcagtgagcactgcagcccacccagcccggcctccagctgcacactgcctccctstcctcttacacccaggggaaggctacgtttgtctacaacccatgtatgcacttccaataatccataatctataaaaagacagctttcaaatcaagta

SEQ ID NO: 93534 - DNA, 599 bp, Chicken  19866894412215_2
  misc_feature (1)..(199): n is any nucleotide
nnnnnnnnnnnnnnnnnnnnnnnnnnnnnnnnnnnnnnnnnnnnnnnnnnnnnnnnnnnnnnnnnnnnnnnnnnnnnnnnnnnnnnnnnnnnnnnnnnnnnnnnnnnnnnnnnnnnnnnnnnnnnnnnnnnnnnnnnnnnnnnnnnnnnnnnnnnnnnnnnnnnnnnnnnnnnnnnnnnnnnnnnnnnnnnnnnnnnnngagcactcgtatctgtttgggagcagtgccgtaaggacgggtgcagaatgcagggtctgacccagccctgggcacggccacactgcccactsctgccaacrcccgtcctgyacagctcctgcccagagctcgtccttccctgcaggagcctccggcmactccasgtggcagaacgtgatcacayagcactacaaatgtgagtcaacatcactgtttaacttccatgtgcggagctgtgttcagtgagcactgcagcccacccagcccggcctccagctgcacactgcctccctstcctcttacacccaggggaaggctacgtttgtctacaacccatgtatgcacttccaataatccataatctataaaaagacagctttcaaatcaagtaattattgtc

SEQ ID NO: 93535 - DNA, 599 bp, Chicken  19866894412215_3
  misc_feature (1)..(189): n is any nucleotide
nnnnnnnnnnnnnnnnnnnnnnnnnnnnnnnnnnnnnnnnnnnnnnnnnnnnnnnnnnnnnnnnnnnnnnnnnnnnnnnnnnnnnnnnnnnnnnnnnnnnnnnnnnnnnnnnnnnnnnnnnnnnnnnnnnnnnnnnnnnnnnnnnnnnnnnnnnnnnnnnnnnnnnnnnnnnnnnnnnnnnnnnnnnnngagcactcgtatctgtttgggagcagtgccgtaaggacgggtgcagaatgcagggtctgacccagccctgggcacggccacactgcccactsctgccaacrcccgtcctgyacagctcctgcccagagctcgtccttccctgcaggagcctccggcmactccasgtggcagaacgtgatcacayagcactacaaatgtgagtcaacatcactgtttaacttccatgtgcggagctgtgttcagtgagcactgcagcccacccagcccggcctccagctgcacactgcctccctstcctcttacacccaggggaaggctacgtttgtctacaacccatgtatgcacttccaataatccataatctataaaaagacagctttcaaatcaagtaattattgtcagaattcttc

SEQ ID NO: 93536 - DNA, 599 bp, Chicken  19866894412215_4
  misc_feature (1)..(143): n is any nucleotide
nnnnnnnnnnnnnnnnnnnnnnnnnnnnnnnnnnnnnnnnnnnnnnnnnnnnnnnnnnnnnnnnnnnnnnnnnnnnnnnnnnnnnnnnnnnnnnnnnnnnnnnnnnnnnnnnnnnnnnnnnnnnnnnnnnnnnnnnnnnnnnngagcactcgtatctgtttgggagcagtgccgtaaggacgggtgcagaatgcagggtctgacccagccctgggcacggccacactgcccactsctgccaacrcccgtcctgyacagctcctgcccagagctcgtccttccctgcaggagcctccggcmactccasgtggcagaacgtgatcacayagcactacaaatgtgagtcaacatcactgtttaacttccatgtgcggagctgtgttcagtgagcactgcagcccacccagcccggcctccagctgcacactgcctccctstcctcttacacccaggggaaggctacgtttgtctacaacccatgtatgcacttccaataatccataatctataaaaagacagctttcaaatcaagtaattattgtcagaattcttcctcttgaggacaatctgctaggctgctatttataccacaaaccgta

SEQ ID NO: 93537 - DNA, 599 bp, Chicken  19866894412215_5
  misc_feature (1)..(136): n is any nucleotide
nnnnnnnnnnnnnnnnnnnnnnnnnnnnnnnnnnnnnnnnnnnnnnnnnnnnnnnnnnnnnnnnnnnnnnnnnnnnnnnnnnnnnnnnnnnnnnnnnnnnnnnnnnnnnnnnnnnnnnnnnnnnnnnnnnnnnnnngagcactcgtatctgtttgggagcagtgccgtaaggacgggtgcagaatgcagggtctgacccagccctgggcacggccacactgcccactsctgccaacrcccgtcctgyacagctcctgcccagagctcgtccttccctgcaggagcctccggcmactccasgtggcagaacgtgatcacayagcactacaaatgtgagtcaacatcactgtttaacttccatgtgcggagctgtgttcagtgagcactgcagcccacccagcccggcctccagctgcacactgcctccctstcctcttacacccaggggaaggctacgtttgtctacaacccatgtatgcacttccaataatccataatctataaaaagacagctttcaaatcaagtaattattgtcagaattcttcctcttgaggacaatctgctaggctgctatttataccacaaaccgtatatagca

SEQ ID NO: 93538 - DNA, 599 bp, Chicken  19866894412215_6
  misc_feature (1)..(116): n is any nucleotide
nnnnnnnnnnnnnnnnnnnnnnnnnnnnnnnnnnnnnnnnnnnnnnnnnnnnnnnnnnnnnnnnnnnnnnnnnnnnnnnnnnnnnnnnnnnnnnnnnnnnnnnnnnnnnnnnnnnngagcactcgtatctgtttgggagcagtgccgtaaggacgggtgcagaatgcagggtctgacccagccctgggcacggccacactgcccactsctgccaacrcccgtcctgyacagctcctgcccagagctcgtccttccctgcaggagcctccggcmactccasgtggcagaacgtgatcacayagcactacaaatgtgagtcaacatcactgtttaacttccatgtgcggagctgtgttcagtgagcactgcagcccacccagcccggcctccagctgcacactgcctccctstcctcttacacccaggggaaggctacgtttgtctacaacccatgtatgcacttccaataatccataatctataaaaagacagctttcaaatcaagtaattattgtcagaattcttcctcttgaggacaatctgctaggctgctatttataccacaaaccgtatatagcaaagcagtaacaaatctgtag

SEQ ID NO: 93539 - DNA, 599 bp, Chicken  19866894412215_7
  misc_feature (1)..(6): n is any nucleotide
nnnnnngagcactcgtatctgtttgggagcagtgccgtaaggacgggtgcagaatgcagggtctgacccagccctgggcacggccacactgcccactsctgccaacrcccgtcctgyacagctcctgcccagagctcgtccttccctgcaggagcctccggcmactccasgtggcagaacgtgatcacayagcactacaaatgtgagtcaacatcactgtttaacttccatgtgcggagctgtgttcagtgagcactgcagcccacccagcccggcctccagctgcacactgcctccctstcctcttacacccaggggaaggctacgtttgtctacaacccatgtatgcacttccaataatccataatctataaaaagacagctttcaaatcaagtaattattgtcagaattcttcctcttgaggacaatctgctaggctgctatttataccacaaaccgtatatagcaaagcagtaacaaatctgtagaacaaaatgtcttttttaagacgaccagacaactaaaaatgcgcctcatttttccccaataaaaaagcatttccaaacaagtctgaatcatctgcttactttataatgag

SEQ ID NO: 93540 - DNA, 600 bp, Chicken  19866894412220_1
ttattttagtacaaagcaccctccttcaggttatttttaacaaatgtctttgcagaacaggccatttggttgtgaagtcactcagtttcacagctgaggaaaaataagacagtatttcaagcgaacctgaaagcccatgtaaagaattgtgttcccatgacgtatgccatgacgtgaatgtaagaggataagaatctaaaggattttgaaaatcacctgcaggaagtcttcaggacttaagtgatgatgatgaatacaggccaccaaatgtttagttgataaaagagtatctggtatccrcttctgctactctagtacagaatccatatggttatgtgaagagatatacatcataatttataagtgtgatagcaagcctataaactcaggtagacctttaccagaaattatcaaaatgttatcataaatkactaaaagtatatataacaaacatggcattttataacctccaataatttcttgtgaattaaacatccrtaaatgtcaaatggaagtggtgtttttgcagacccaccagtcactttctattaatgtgaaacaaggaagtttagcacttctgtataaaatcttgcctggatt

SEQ ID NO: 93541 - DNA, 600 bp, Chicken  19866894412220_2
aagcccatgtaaagaattgtgttcccatgacgtatgccatgacgtgaatgtaagaggataagaatctaaaggattttgaaaatcacctgcaggaagtcttcaggacttaagtgatgatgatgaatacaggccaccaaatgtttagttgataaaagagtatctggtatccrcttctgctactctagtacagaatccatatggttatgtgaagagatatacatcataatttataagtgtgatagcaagcctataaactcaggtagacctttaccagaaattatcaaaatgttatcataaatkactaaaagtatatataacaaacatggcattttataacctccaataatttcttgtgaattaaacatccrtaaatgtcaaatggaagtggtgtttttgcagacccaccagtcactttctattaatgtgaaacaaggaagtttagcacttctgtataaaatcttgcctggattactgactctgagaaccagaaatctgaagacacttgtccatatccctgtgtacttcattaaaacttgttcattaaaactgtatacttcattaaccaaagagcagtgcatgtttttcattacctctcccatg

SEQ ID NO: 93542 - DNA, 600 bp, Chicken  19866894412220_3
aaggattttgaaaatcacctgcaggaagtcttcaggacttaagtgatgatgatgaatacaggccaccaaatgtttagttgataaaagagtatctggtatccrcttctgctactctagtacagaatccatatggttatgtgaagagatatacatcataatttataagtgtgatagcaagcctataaactcaggtagacctttaccagaaattatcaaaatgttatcataaatkactaaaagtatatataacaaacatggcattttataacctccaataatttcttgtgaattaaacatccrtaaatgtcaaatggaagtggtgtttttgcagacccaccagtcactttctattaatgtgaaacaaggaagtttagcacttctgtataaaatcttgcctggattactgactctgagaaccagaaatctgaagacacttgtccatatccctgtgtacttcattaaaacttgttcattaaaactgtatacttcattaaccaaagagcagtgcatgtttttcattacctctcccatgtgtttgccctgcttgaagcagtcagctcaagaataacctggataagactgctttgctccatgctcttt

SEQ ID NO: 93543 - DNA, 600 bp, Chicken  19866894412235_1
acacctggaggtgctgagtgccctggtcccgtcctgcagacctattgcttttggcagaaatacacctgagtgctgtttggggcagggtgctgagattctgggtttgtttggttgtatttgctcaagtctgcagcagcagcttatcggcaagagcaaatatcccccattacatcacccacctttttcagctgcagcattgatagttatccaattagagctttttatattcagggtgagaatatgcaaaggcaaatctaccagcgtcaataacgcaacagttgtcttatcgctgagctggakagagtaataaaatatatatgccgtcgatattttggtcttgaactattattgagatattgacacaccacagaaatatgatattgactctctttgtctgttttattggtgcgtttggccacaaactttgtgggtttttttcctaccagattccgtgtgcgtgggatgcatccgctgtctaaccctgacagctgattgccaatttatttcaggtcaaagaatgtgcaggtctctgtaaggtagtttgaaacagcatctttattatcacggctcacgtgttgttggccagttccatttgtttcg

SEQ ID NO: 93544 - DNA, 535 bp, Chicken  19866894412235_2
tttttttcctaccagattccgtgtgcgtgggatgcatccgctgtctaaccctgacagctgattgccaatttatttcaggtcaaagaatgtgcaggtctctgtaaggtagtttgaaacagcatctttattatcacggctcacgtgttgttggccagttccatttgtttcgctacttgtgccctccaggcatgcaatataatcttcaactggttgttaggaccaaatggtctggtttttagccggtttgctgcaggcaaagtcctgtaggaagcccagcagggcatgtgttcccactttgcrtgagttggtctaatgatattttccccattaacgtttggaagaaagatctaatctgcgggggctgggggaaaaagtctgtctgagggctgtcagctgggagataactgctaatggtaacgggctgccagctgacatcgcagatatgcctggaatgtgtgtgttcagtcaaatgcgttggggaaaaaagtacagtttgggtgccacaagggttctgaacagacttcttcctttaaca

SEQ ID NO: 93545 - DNA, 600 bp, Chicken  19866894412238_1
agcaacaactgtcccattagaaattagaaaggaaaggcttcaaagtctgttacatagcatcccgtgttgaataccggactactataaaacacagatggcataaaatgccactgctgatgttaagaggtcagctgtgataaattcaattaatgtctaagaagtctacaaaatacctgaattaataataaaaatagcaattgtggtaagatactaaatgatagtgttctttataaaaaatgaaatgtgaagtgtttcaccttgtcttgaaatcttgaaaatgtatagcaaacatatttggtscatgattgctgctgaagaaccctgaaacagagctgtgataatgtaaatggtacatcactagggccagtcattttgagctaagtgactcccagttccttatcacayaagtgatcattaaaataatactataatttctgttctcagcaatatttctgtatgttccttctatacagaaactaggaggaaggcttgtgtcagtaaatgaagagcccacagtgtcaccttcttataagtgacaaaattattggtactgaatgcaaaaatcacctagatatttacatcattatagctggcacagtc

SEQ ID NO: 93546 - DNA, 600 bp, Chicken  19866894412238_2
tgccactgctgatgttaagaggtcagctgtgataaattcaattaatgtctaagaagtctacaaaatacctgaattaataataaaaatagcaattgtggtaagatactaaatgatagtgttctttataaaaaatgaaatgtgaagtgtttcaccttgtcttgaaatcttgaaaatgtatagcaaacatatttggtscatgattgctgctgaagaaccctgaaacagagctgtgataatgtaaatggtacatcactagggccagtcattttgagctaagtgactcccagttccttatcacayaagtgatcattaaaataatactataatttctgttctcagcaatatttctgtatgttccttctatacagaaactaggaggaaggcttgtgtcagtaaatgaagagcccacagtgtcaccttcttataagtgacaaaattattggtactgaatgcaaaaatcacctagatatttacatcattatagctggcacagtccttgcattttctgaatattaatgtcattgaaataactgacatttatgcaaacttagattcttcttacatcggttacctaagaatttgacctctcctataagctct

SEQ ID NO: 93547 - DNA, 452 bp, Chicken  19866894412239_1
tcctctgccagcttcaaactgatttggtacagcttgccagtgaagtgcataaccttcagagacacttgtttgagttacagaaactgtctgattctcttaatataacaaatcccatccctagggctagatgcaacatggtgctggtgtatttaatatgcttctggttctgtgagtagcttgtccagcactccactgcatggtgcctgcaattaatggcacaaatagccatctgtgaaaaactgagcaatggtgacaaaaagcctatgaagatatgagaatcctgtatatccttgagcttgkaaatggcattcagcactgagttacctgagcattactggaataccagttcactgagtgctgtcctttcttttcactaaagaactggatcaaatagtgataaaagacagtattcattaattaacagttggctaataatattgtctttgtatgtt

SEQ ID NO: 93548 - DNA, 599 bp, Chicken  19866894412246_1
  misc_feature (1)..(2): n is any nucleotide
nntcatagccacaccaaaatgaaaagaggacaaataacttacagaagtggggaacaccgtcctgtggggatggatggtggcaaggtgaggactggaggtgatggccaggctgccgtctgcaagagcacccatgggttgggtgggagctggggaagcatgggagcctggggagtgcagccaaacccagcctggctggcagctctgcaccaggaaaggtaacttaagccagtacatccaggcttcaccatgccttgagctctacttagaatgcttacaatcatcatttctcttttgcaaaamccaatagtcaatccccctctttctgggcacccaccaggcacctctcagctctgagagctgtgctctgagatgaggatgtgttgaggtttgaggggatcttggaaggaacattatggagccaggaactaaacagggacatctcttgttgtggacacgtgaactgagtggcactgargtggtgctgcaggttggtgcccatcagtcctggaatccttctgacccagaagccayggagggagctgttagggtggttgtgtgggaacacatttctcatactaattgctccatgcaagtttata

SEQ ID NO: 93549 - DNA, 600 bp, Chicken  19866894412246_2
agccaaacccagcctggctggcagctctgcaccaggaaaggtaacttaagccagtacatccaggcttcaccatgccttgagctctacttagaatgcttacaatcatcatttctcttttgcaaaamccaatagtcaatccccctctttctgggcacccaccaggcacctctcagctctgagagctgtgctctgagatgaggatgtgttgaggtttgaggggatcttggaaggaacattatggagccaggaactaaacagggacatctcttgttgtggacacgtgaactgagtggcactgargtggtgctgcaggttggtgcccatcagtcctggaatccttctgacccagaagccayggagggagctgttagggtggttgtgtgggaacacatttctcatactaattgctccatgcaagtttatatccagaaaaatacgagatttttatggccagcatcgttttctggcagtaaacagttcatcagaaaactcctgacatgctgggatttggctttcttaatcagaatgccttgttgttctgtgcagttctggaaaatgctaaactactgttcattttgtttttataatttcgctgtaaac

SEQ ID NO: 93550 - DNA, 600 bp, Chicken  19866894412246_3
catccaggcttcaccatgccttgagctctacttagaatgcttacaatcatcatttctcttttgcaaaamccaatagtcaatccccctctttctgggcacccaccaggcacctctcagctctgagagctgtgctctgagatgaggatgtgttgaggtttgaggggatcttggaaggaacattatggagccaggaactaaacagggacatctcttgttgtggacacgtgaactgagtggcactgargtggtgctgcaggttggtgcccatcagtcctggaatccttctgacccagaagccayggagggagctgttagggtggttgtgtgggaacacatttctcatactaattgctccatgcaagtttatatccagaaaaatacgagatttttatggccagcatcgttttctggcagtaaacagttcatcagaaaactcctgacatgctgggatttggctttcttaatcagaatgccttgttgttctgtgcagttctggaaaatgctaaactactgttcattttgtttttataatttcgctgtaaacctgtccaaaaatcctaaacaacaaaaagccaacaaagcaaacgcagccctgtgctg

SEQ ID NO: 93551 - DNA, 600 bp, Chicken  19866894412252_1
agtccctggataaatgataattaatttgttatcagaggcaaataaattggacatctcatttatagatatgtaggcataagtgcatcaagatactgccgtgaggacattaaaaataagacttttagccttctgcttaaagactgtactaaataacaacatgttgctaattgaacagatgttataactgtaagatcacacagttcattttattctgtggggctgaagtctgaaacctaaatgtcataacaacttaaaattgtgagacaagtattccagaattattttcctaaacagaacttkgaacaataccagtggtcatgggacaccattagcttagtgctgccttctgatatcaagacaaatctattaaaaatagtattaatgagaagtattcagtgcaaaccaaataatcctttctctacaaagaacgagcaaatgacaaattcgatctaaccagaactccacagctataatcattatccttattcagctcaacaccttaccctgaaaacaagtactaaagatgctataagttgtcaagaagtaaaacatgcttaagaaacctgaggttaaactaaacaacagcaaaaacagctgcat

SEQ ID NO: 93552 - DNA, 600 bp, Chicken  19866894412259_1
agatcagggctatataggtctgaacgacccttgcaaaagctaactgcgttgagatcatttagaaacctgttcttaggaactatggaactgtctcagctctcttttaagtagaagtgaacagagaaagcagatcatcacatatgttatatccagcgcactgtaagattaaatttaaactgccatgacttgtatttcttagccatgagattaatatctgggaaagttcagcaacagaagtttagctaggaaagcttacacttcttgaatacttctccattgctctaaaattattacaaattmgttcaataaggagcaaaaagtttacttaaaatatattgctaagaaatccctatgggtaatttaacattttttaatgctacagtggaggattttaagcgaatgtttaaatgaacaagaactgatatataacaagaagtgtgcacagcaatacacttcatttagtgttacattttggcaacagcaagtgcattattgcctcttccagaaatgtcttggtcagccaggcaaaagcagctcccacgtgggagggcaaggactattatgttacatggttttactggagataattctttactaaac

SEQ ID NO: 93553 - DNA, 600 bp, Chicken  19866894412264_1
aatagagcccagctgccaaacaccagaggaacccgggctgcccacacgggcttccctctattcagcacggccttttacccgcagtccctctatgcctttcaatcacgtccatttcaatcagatccatttcctattacaatttaaagaataggatacagactgaaagaatttctatagaaccacaccgtttctaaaatgtcgtcttcatctacaagactacggggaaagccaacttaatttgccaaatttgcataaatattaagtagtgtttctagagctgattgtacccttccatccccrctctgatctgtgatgatgcagctgtaatcaaacttcacgttctctttgtaccttatcaagagcatcaagcatgtgtttgtggatatgtggttgtttttgacacatctttctttaaaatccatctttcctaagaaattttcattctaactgcaccagcatggaaacaaatatttaaactttgtcaccttccagaatctgtggtatgggaacagaagtccatggttccccagtgctggggaatgctttttcagtgtatcttaacagatacttaaagcttaccatctgcccaaagaatttctt

SEQ ID NO: 93554 - DNA, 600 bp, Chicken  19866894412266_1
attgctgtgctgcaggatctcagagaagcaccagtgagtggcatggaaatgatgctgtaccccactgattccctgcaacgtggttatcacggtaacttgcaaggccctcaaagaagcagggcagtaagttattacttgtttccttctttaattcccactgcgaaggaagttatctaacacactcattttccaccttttccctaccacaggcacaacgtaatggagtttcaagtcctgctaccaaaactccatagaaaaaagaggagggaaagtaagagctgactctgctggcccgactcytgcacattgctgttcaaggagctgtgtctagcaggttttttctccctgttttccctgtcattggtttagggatggatgagctgaatctctggagtgaatcaggccaatgcagatgtaatacacagcgcccagagctcatccagtcctccctgcactgcacttctttgcctacacactgcacgctggttttgcactgacccttacaatrcccccattgcagatctccagtgaagatgaaagcaggaggattatgccagttgcagtgtatagtatgtatgaggagctgaagtacattagaac

SEQ ID NO: 93555 - DNA, 600 bp, Chicken  19866894412266_2
ggcacaacgtaatggagtttcaagtcctgctaccaaaactccatagaaaaaagaggagggaaagtaagagctgactctgctggcccgactcytgcacattgctgttcaaggagctgtgtctagcaggttttttctccctgttttccctgtcattggtttagggatggatgagctgaatctctggagtgaatcaggccaatgcagatgtaatacacagcgcccagagctcatccagtcctccctgcactgcacttctttgcctacacactgcacgctggttttgcactgacccttacaatrcccccattgcagatctccagtgaagatgaaagcaggaggattatgccagttgcagtgtatagtatgtatgaggagctgaagtacattagaacaaggattagaatccccaaataattcctgctagtcctgtgtgtgaccactggggagaaggaaatgaggctcaggaaggaggagagcatgaggcagagccaggaagtcctgtgtgttcattagagctcccacagagcatcggggaaattctaaccttggtactgctaagatttcctgcaccagtttctacgtagctattaaacataagac

SEQ ID NO: 93556 - DNA, 600 bp, Chicken  19866894412267_1
ctgatctgttgtaagatgagacgaatctccgttaaatgtgcattgaactcagggtatctaaagttaggtgagacaaatccagcccagaggctgtatatttcatagatttctgctgccactcgatacttgttgaatgatagctaaccagtgatactaaaaaaaagaagatactacctatagtgtgctagagtgtagtgaagacagatttttttcatgtgaagctttaaggtacgtagatgactatagatgcatgtccagtgtcttctgagccatcccatcccataaatccctaggaaagcrtacctctgtaattctgctgctcatcaagcactttgttccatagttgmactcctgctctaattctgtgtttgtttcgttatgctttagtattagcggaaggtatgttgaatctgacacggtgcacaaagtaggagagcgaggcagaatgaaaagtgccctattcatggtacatattattgagagaatggcctagcggtggtgggagactggatttttctctttgcaatttttatcgaatcttccaggaaaatcttactcatgttttgtatttggagaaggaggaaaaaatttaagttactt

SEQ ID NO: 93557 - DNA, 600 bp, Chicken  19866894412267_2
ctcagggtatctaaagttaggtgagacaaatccagcccagaggctgtatatttcatagatttctgctgccactcgatacttgttgaatgatagctaaccagtgatactaaaaaaaagaagatactacctatagtgtgctagagtgtagtgaagacagatttttttcatgtgaagctttaaggtacgtagatgactatagatgcatgtccagtgtcttctgagccatcccatcccataaatccctaggaaagcrtacctctgtaattctgctgctcatcaagcactttgttccatagttgmactcctgctctaattctgtgtttgtttcgttatgctttagtattagcggaaggtatgttgaatctgacacggtgcacaaagtaggagagcgaggcagaatgaaaagtgccctattcatggtacatattattgagagaatggcctagcggtggtgggagactggatttttctctttgcaatttttatcgaatcttccaggaaaatcttactcatgttttgtatttggagaaggaggaaaaaatttaagttacttcgacagcagtactgagaaattaaaccagaacggcgtgcctgtgggag

SEQ ID NO: 93558 - DNA, 501 bp, Chicken  19866894412267_3
actttgttgtagctttggagagtgctctgctgcagttttatggaatcatatattggttatgagccgtttggtaggtaggatgagacaaagcaatggggaaagttttataaactaaactttattgtagcaagctattgtgttgctacatcaacataacctccactttggaaactgaaataccagaatcttagtacattaacagagagggtgtttcacgctgatgaattagtggatattttggagtttgatgcttgtcaaccagtgcagcacaaaagggttggtgtgttggtgcctatgcaygagaacatgggctgctacctttgatgtgaaaccaaggaaatgttgtatagcttgaagaggtgctgcatttagcagcccttggttttattttgtttttagcacttccattcacaattaatgaccgtagaccgtacagtatatttgttttctctgtattacaaattgctttgtgtgtgcgttcatgcagcagaacagacattt

SEQ ID NO: 93559 - DNA, 599 bp, Chicken  19866894412268_1
  misc_feature (1)..(163): n is any nucleotide
nnnnnnnnnnnnnnnnnnnnnnnnnnnnnnnnnnnnnnnnnnnnnnnnnnnnnnnnnnnnnnnnnnnnnnnnnnnnnnnnnnnnnnnnnnnnnnnnnnnnnnnnnnnnnnnnnnnnnnnnnnnnnnnnnnnnnnnnnnnnnnnnnnnnnnnnnnnnnnnnnnnttatgcaggattttgacactgtaaaacaggaaaatcctcttaacagacacgtggaacaaactgttctgccatggcactgcattaataagcaggtgtagcaacatcaacttgaaggtgccaagttcagcccctgctaraagtggctccttctcttcccttgggtttagcagtgccccagtcccaggtgctggagaaggacgccaaggagaagctgtgcagaggtgcagcagctgggaagtgggagcttctccctctctaaagctccataccttactgggtgaaacctcatcatgtagcctgggcacctcgcttggtcgtcagggttgcacctggctctgaagaaagccatacagcaggatctcccatcagtttattttcttttcttcctttctccttttcttctttcggtgccataccgaccaactggcaatttttt

SEQ ID NO: 93560 - DNA, 600 bp, Chicken  19866894412272_1
cccctaaaaagctgatatcaatcattcttgtctaaggtctgaagagaatgtaacctgcaaagactggtagctgggctatctgccatcattgctggcagcatgaaggcctaggatacagccttctaataggaagaatatggagaaaagtctgtctggtttttatacgtgttaagtttctgagattacttcatgtagttgtgtatgaaaatagtgattctagacttcatgatcttctcagaatgtgtggctctgtgaactattgctctccaggtatgaaactatccctggttttgaaaaatrgcatggcrcaggggctttggtctattaccaagatgagtagcagcctaggacrgagatgttgattttgttacatgaatataaagtgctagtacaataatgccccagtgagaacaggggcaaactctatgaggatgaggttaaaatagattcattattgtgttaatcaatgcttacaatcatacagaatagggaacactgaatacctaatactcagttcataactacgtagcctattatttctagaatcttccagaaaatattaatatttattttctgtggatgatgagattgtacaaattt

SEQ ID NO: 93561 - DNA, 600 bp, Chicken  19866894412272_2
aagctgatatcaatcattcttgtctaaggtctgaagagaatgtaacctgcaaagactggtagctgggctatctgccatcattgctggcagcatgaaggcctaggatacagccttctaataggaagaatatggagaaaagtctgtctggtttttatacgtgttaagtttctgagattacttcatgtagttgtgtatgaaaatagtgattctagacttcatgatcttctcagaatgtgtggctctgtgaactattgctctccaggtatgaaactatccctggttttgaaaaatrgcatggcrcaggggctttggtctattaccaagatgagtagcagcctaggacrgagatgttgattttgttacatgaatataaagtgctagtacaataatgccccagtgagaacaggggcaaactctatgaggatgaggttaaaatagattcattattgtgttaatcaatgcttacaatcatacagaatagggaacactgaatacctaatactcagttcataactacgtagcctattatttctagaatcttccagaaaatattaatatttattttctgtggatgatgagattgtacaaatttttaatgat

SEQ ID NO: 93562 - DNA, 588 bp, Chicken  19866894412272_3
acctgcaaagactggtagctgggctatctgccatcattgctggcagcatgaaggcctaggatacagccttctaataggaagaatatggagaaaagtctgtctggtttttatacgtgttaagtttctgagattacttcatgtagttgtgtatgaaaatagtgattctagacttcatgatcttctcagaatgtgtggctctgtgaactattgctctccaggtatgaaactatccctggttttgaaaaatrgcatggcrcaggggctttggtctattaccaagatgagtagcagcctaggacrgagatgttgattttgttacatgaatataaagtgctagtacaataatgccccagtgagaacaggggcaaactctatgaggatgaggttaaaatagattcattattgtgttaatcaatgcttacaatcatacagaatagggaacactgaatacctaatactcagttcataactacgtagcctattatttctagaatcttccagaaaatattaatatttattttctgtggatgatgagattgtacaaatttttaatgattggataacacatatttaaagggtataccagtt

SEQ ID NO: 93563 - DNA, 600 bp, Chicken  19866894412279_1
tggttaactattgatggttttgatctttgatgtagagattcctttgagatggaaatcgaacaatgaaagggactgttcccgctaggcatgcatggtaccaacagacaattttcttcaaacaggtatagaaaaaatgtcaagcatctgatgtaattttaatgggctttgcagcatgaatagttggtgtttatcttatctttaaaaattcaaccttttaaatattcagcttcaccataatttacaaataggtacttaattgctactccatgctccacatctatgctttagctattactcctrgagatttatttaatggagtcattctcttagaaatggaacaacgggaagagtcgggcagagtgatgttactattagccacaaagagctgccatgtgcagaacattaaccctacatcagaacctgtcccatttaacctgctacaaagaaaacataaacataaatgatgcaagcatcgtaggagtaattttaaagcatgcttccgtggctggctgtgctctgaaatgccattccattcatgaagccccttgctactaaattattttctccctgccagacatmactgagactctcytcacaacc

SEQ ID NO: 93564 - DNA, 600 bp, Chicken  19866894412279_2
atgctttagctattactcctrgagatttatttaatggagtcattctcttagaaatggaacaacgggaagagtcgggcagagtgatgttactattagccacaaagagctgccatgtgcagaacattaaccctacatcagaacctgtcccatttaacctgctacaaagaaaacataaacataaatgatgcaagcatcgtaggagtaattttaaagcatgcttccgtggctggctgtgctctgaaatgccattccattcatgaagccccttgctactaaattattttctccctgccagacatmactgagactctcytcacaaccctgctgcccacacatcttgcagtgtgtctgtgctgcagcggccatgtctgcagcatgccttcctgcaccatgcagcacaccacaaacaaacaacgcagaagaacacaagcaacttttgttctgtccagcccactgccttctgagtgccctcaacattttgcttccacttcagttcatggagataaagtttatttcaaatgatgcagttgtgatcccactttcatagaatcatagaatcacagaatcatggaatcaccaagggtggaaaagacccacagg

SEQ ID NO: 93565 - DNA, 600 bp, Chicken  19866894412279_3
tactcctrgagatttatttaatggagtcattctcttagaaatggaacaacgggaagagtcgggcagagtgatgttactattagccacaaagagctgccatgtgcagaacattaaccctacatcagaacctgtcccatttaacctgctacaaagaaaacataaacataaatgatgcaagcatcgtaggagtaattttaaagcatgcttccgtggctggctgtgctctgaaatgccattccattcatgaagccccttgctactaaattattttctccctgccagacatmactgagactctcytcacaaccctgctgcccacacatcttgcagtgtgtctgtgctgcagcggccatgtctgcagcatgccttcctgcaccatgcagcacaccacaaacaaacaacgcagaagaacacaagcaacttttgttctgtccagcccactgccttctgagtgccctcaacattttgcttccacttcagttcatggagataaagtttatttcaaatgatgcagttgtgatcccactttcatagaatcatagaatcacagaatcatggaatcaccaagggtggaaaagacccacaggatcacccagtcca

SEQ ID NO: 93566 - DNA, 600 bp, Chicken  19866894412290_1
tgatgattcatatgaatatattttcacataattaaatgttgaaaagttcttacaatttgtgttatcctggtgtgctgttacctttctagtttgttattccagtgcagcaaatagaacaaagctacactgacacccgagtttcattcctattgtatttaaatcctgtttcctgaaagaaggttgcttatacactgtaaataggttcacaagacactcaatgtatttaaatgagctctattctaagatgagttacagtcacttcatgaaactttgactgcttgtcagtcaggactgaccagrcccacagcacttctccctccactctactcatttgcacatacaaccaacatctgaagattttatactcatatcagtatccacatgaaaaaactctgtagaactaagttttcaatatcctttgaaaagtaaacaaaaagccttactctgctgaagcacttcatgatctgcatcactgtgacaaatcattaaactgtcttttccagtgtatttgtaacttgacacccttaatggtagaaaaatatgcatcatttgaatcacaggatccaccagaacttcactgcttatgatgcaccatctagc

SEQ ID NO: 93567 - DNA, 599 bp, Chicken  19866894412292_1
  misc_feature (1)..(223): n is any nucleotide
nnnnnnnnnnnnnnnnnnnnnnnnnnnnnnnnnnnnnnnnnnnnnnnnnnnnnnnnnnnnnnnnnnnnnnnnnnnnnnnnnnnnnnnnnnnnnnnnnnnnnnnnnnnnnnnnnnnnnnnnnnnnnnnnnnnnnnnnnnnnnnnnnnnnnnnnnnnnnnnnnnnnnnnnnnnnnnnnnnnnnnnnnnnnnnnnnnnnnnnnnnnnnnnnnnnnnnnnnnnnnnntaggtaagacaagggagagcaaaacgggtactaaataagtgataggaaaagggaaactcataattcttccctccacrcaactgacatgaacgaggtattcacagcaagagatccagcagagaagacaaggcatcgagtacaagaagctgtcagtctgaacatcattctgcccttcctgagaaatccttcttcgaagagacaggaccaccacagagcaattcccagccctgctggatatggaagctgctggaggatgttgccataaggcagaacatgtggctgccctggtgcccagggaaggcagcagcactgattggctttgtgctgtttgctagcaaaatagaaagagataagacatatggaagtttgtctagct

SEQ ID NO: 93568 - DNA, 600 bp, Chicken  19866894412292_2
gatccagcagagaagacaaggcatcgagtacaagaagctgtcagtctgaacatcattctgcccttcctgagaaatccttcttcgaagagacaggaccaccacagagcaattcccagccctgctggatatggaagctgctggaggatgttgccataaggcagaacatgtggctgccctggtgcccagggaaggcagcagcactgattggctttgtgctgtttgctagcaaaatagaaagagataagacatatggaagtttgtctagctgatgcaacaatgtactagaagccagcaaacacygagcactgctctgtttcttytgcagcttttacttggtcagttcatattgctccataaatcamttttctcattcaaaaaataaaataaaataaaagacaaaayaggacaacaatttttcttacctctcccttaygtggataatgagtactgagctggcagaccctggcacagaagtggtctgacataaaggtgtggagagagcagcactaaggagaatatgccrtttcttccttgaccagatggggtttgagtgaatgccacctaatgcagaacagaggaagaaaagtaaagacgttgtat

SEQ ID NO: 93569 - DNA, 600 bp, Chicken  19866894412292_3
gcatcgagtacaagaagctgtcagtctgaacatcattctgcccttcctgagaaatccttcttcgaagagacaggaccaccacagagcaattcccagccctgctggatatggaagctgctggaggatgttgccataaggcagaacatgtggctgccctggtgcccagggaaggcagcagcactgattggctttgtgctgtttgctagcaaaatagaaagagataagacatatggaagtttgtctagctgatgcaacaatgtactagaagccagcaaacacygagcactgctctgtttcttytgcagcttttacttggtcagttcatattgctccataaatcamttttctcattcaaaaaataaaataaaataaaagacaaaayaggacaacaatttttcttacctctcccttaygtggataatgagtactgagctggcagaccctggcacagaagtggtctgacataaaggtgtggagagagcagcactaaggagaatatgccrtttcttccttgaccagatggggtttgagtgaatgccacctaatgcagaacagaggaagaaaagtaaagacgttgtattgataggaagatactggtga

SEQ ID NO: 93570 - DNA, 600 bp, Chicken  19866894412292_4
cttcctgagaaatccttcttcgaagagacaggaccaccacagagcaattcccagccctgctggatatggaagctgctggaggatgttgccataaggcagaacatgtggctgccctggtgcccagggaaggcagcagcactgattggctttgtgctgtttgctagcaaaatagaaagagataagacatatggaagtttgtctagctgatgcaacaatgtactagaagccagcaaacacygagcactgctctgtttcttytgcagcttttacttggtcagttcatattgctccataaatcamttttctcattcaaaaaataaaataaaataaaagacaaaayaggacaacaatttttcttacctctcccttaygtggataatgagtactgagctggcagaccctggcacagaagtggtctgacataaaggtgtggagagagcagcactaaggagaatatgccrtttcttccttgaccagatggggtttgagtgaatgccacctaatgcagaacagaggaagaaaagtaaagacgttgtattgataggaagatactggtgaggtcaaagagccttaaaaaaaaagtttgaaattgcataaaat

SEQ ID NO: 93571 - DNA, 600 bp, Chicken  19866894412292_5
agagcaattcccagccctgctggatatggaagctgctggaggatgttgccataaggcagaacatgtggctgccctggtgcccagggaaggcagcagcactgattggctttgtgctgtttgctagcaaaatagaaagagataagacatatggaagtttgtctagctgatgcaacaatgtactagaagccagcaaacacygagcactgctctgtttcttytgcagcttttacttggtcagttcatattgctccataaatcamttttctcattcaaaaaataaaataaaataaaagacaaaayaggacaacaatttttcttacctctcccttaygtggataatgagtactgagctggcagaccctggcacagaagtggtctgacataaaggtgtggagagagcagcactaaggagaatatgccrtttcttccttgaccagatggggtttgagtgaatgccacctaatgcagaacagaggaagaaaagtaaagacgttgtattgataggaagatactggtgaggtcaaagagccttaaaaaaaaagtttgaaattgcataaaattgatactttcacacaaacaattatttccccttgtaccatc

SEQ ID NO: 93572 - DNA, 600 bp, Chicken  19866894412292_6
gctgctggaggatgttgccataaggcagaacatgtggctgccctggtgcccagggaaggcagcagcactgattggctttgtgctgtttgctagcaaaatagaaagagataagacatatggaagtttgtctagctgatgcaacaatgtactagaagccagcaaacacygagcactgctctgtttcttytgcagcttttacttggtcagttcatattgctccataaatcamttttctcattcaaaaaataaaataaaataaaagacaaaayaggacaacaatttttcttacctctcccttaygtggataatgagtactgagctggcagaccctggcacagaagtggtctgacataaaggtgtggagagagcagcactaaggagaatatgccrtttcttccttgaccagatggggtttgagtgaatgccacctaatgcagaacagaggaagaaaagtaaagacgttgtattgataggaagatactggtgaggtcaaagagccttaaaaaaaaagtttgaaattgcataaaattgatactttcacacaaacaattatttccccttgtaccatctactgctacagataaacattccttgccaact

SEQ ID NO: 93573 - DNA, 527 bp, Chicken  19866894412292_7
tagcaaaatagaaagagataagacatatggaagtttgtctagctgatgcaacaatgtactagaagccagcaaacacygagcactgctctgtttcttytgcagcttttacttggtcagttcatattgctccataaatcamttttctcattcaaaaaataaaataaaataaaagacaaaayaggacaacaatttttcttacctctcccttaygtggataatgagtactgagctggcagaccctggcacagaagtggtctgacataaaggtgtggagagagcagcactaaggagaatatgccrtttcttccttgaccagatggggtttgagtgaatgccacctaatgcagaacagaggaagaaaagtaaagacgttgtattgataggaagatactggtgaggtcaaagagccttaaaaaaaaagtttgaaattgcataaaattgatactttcacacaaacaattatttccccttgtaccatctactgctacagataaacattccttgccaactctacactcacacaccca

SEQ ID NO: 93574 - DNA, 592 bp, Chicken  19866894412293_1
gaagggctcttctccaaagacacaggaaaatgtatgtttgtttctgtttcatttcctttgcaggttccatgttgggaatccctgtcccagcctagttgcagggcttccaggggctgcctgcagtacctttgtgtctcagggctgcttgcccatctagagaggatcttaataggggaatttcctattttagtttcctggagaaacttacaagttgactttgaaatattgcaaaggataatattttacagtctatatagatttttcaaatttgattctatcactttaaagtttctttttacwtttgttcataagctcaattttactattaccttactgattaaacagcagtgatctggtcttgtttgtaagcagaaacacttgataaggaagaatccagaagcattaatttgaatttcctggttctttatatgtatagcactcaactttgtcagtcttgaccttttccttctgtttataggtaatgcatcgatcttgctgcctttctgcaagaatgagaactttgttgaatctgtatgagtttgtacacataagtatgtacttgagtacatatatatgtgtattgcatgtgcag

SEQ ID NO: 93575 - DNA, 599 bp, Chicken  19866894412297_1
  misc_feature (1)..(36): n is any nucleotide
nnnnnnnnnnnnnnnnnnnnnnnnnnnnnnnnnnnnccatgatcatcaagaaattggagcatctctcctctgaaaagaggctgagatagctgggactgttcacctggagaagaggaggctaaggaagatctcatcagtgggtataaatacctgaaggaggttgcaagaaagatggagcaggctcttttgagtggagaccagtgacaggagaagaggcagtggacaaatactggaacccaagcagttccatctgaacaccaggaagcacttctttacatagtaaagaagttttctttggamaggttgtttgaagaaacaatggaatctcctccagggagattttcaaaagacacctgggcatcttcctgggcaacctgctttaggtgcaccttcttgagcagggagactatatcagatgacttccagcgaccccttccaatcttaaccattttgtgattccatctatctgcatacctgcagacgtatgtgtgtatgtgtacacacaaatacaagcacacaagcacatagcataaatgtacacaagtgtacagtgagttctagaggatacataaatacctaatcatgtataaacacacata

SEQ ID NO: 93576 - DNA, 599 bp, Chicken  19866894412302_1
  misc_feature (1)..(8): n is any nucleotide
nnnnnnnnttcactatttcatttttttattcctgctgttcttcactcccttcaatttcaatgtgcctgcagctgtgccagcattaaacaggcttgtctacaccagaaacacacataaactaaatacatttgatgccttatgtattagaccacactacagtttatattgacatccatggagaaagctcaaggaaagcactggagtagttagaaggcttctctgtcctaatccagcactgcattttctaaacacttctactccaaagtctctctcagccccaaggagttaactcactcttcyttgttgccttccctctgtctgtaacatggctgaggctttttcatctctttccccccccagttctctatgctgctgtccttgctcagatgtcaccattgtgctttgtacagagaacaaaagataacccacaatgctataaggaactacattatattaggaatgtgttttcttagagaactatattggcagcagtctcagtaaataatgttttctgctgttttcagagcagggagaactcactcatatagcaaccagagaagcaaaataaaaaaaaaagaatgtagtgaatacagtagcag

SEQ ID NO: 93577 - DNA, 600 bp, Chicken  19866894412302_2
aaatcttgaaggtagtgccttctcttccagccccaaaattatggttattgctttttttttttgataatttattactgtgctatcaaatgacctccacaattgaactctaaatcagcaagcttccagagcaaggatacttaaatctcacaacagcagaagaaatcacaagctgttttaatgctacagcaaacaattagtttcagtctcctctagaagagggtcaagagatcaacctcagtcttgaggggcaggagggtacaacagagactgagagtatcacaggggctgccacccaccccrattccccaaggtgctatattcctcagcagaagtctggcagaacttactcagaaaggtgacaaattccttcttgtctgatcacatgmaggaaagcagcaactgaggctgcagcaagagaggaaaggctatgtggttcctggtaatgcaaccatgaagtaggaacagtagactcagggaagggtttagaatgattgtgaaacaggtttccagtgaaggaggtatctcactgctgaaaagttagtgggattaaggcaagctgtgaaattaaaaccaaatagctgttccaaaataacagcatgt

SEQ ID NO: 93578 - DNA, 600 bp, Chicken  19866894412302_3
atgacctccacaattgaactctaaatcagcaagcttccagagcaaggatacttaaatctcacaacagcagaagaaatcacaagctgttttaatgctacagcaaacaattagtttcagtctcctctagaagagggtcaagagatcaacctcagtcttgaggggcaggagggtacaacagagactgagagtatcacaggggctgccacccaccccrattccccaaggtgctatattcctcagcagaagtctggcagaacttactcagaaaggtgacaaattccttcttgtctgatcacatgmaggaaagcagcaactgaggctgcagcaagagaggaaaggctatgtggttcctggtaatgcaaccatgaagtaggaacagtagactcagggaagggtttagaatgattgtgaaacaggtttccagtgaaggaggtatctcactgctgaaaagttagtgggattaaggcaagctgtgaaattaaaaccaaatagctgttccaaaataacagcatgtagtgataagccctgtaatgcaaatactgagcacatgctttggattactgttaatcagttaaactggagtagtcccccaattttatt

SEQ ID NO: 93579 - DNA, 599 bp, Chicken  19866894412305_1
  misc_feature (1)..(11): n is any nucleotide
nnnnnnnnnnnctaaaatgctccttgcaaaccctttttgatgctcacagttaagccagacttcatgcacgcttgaagcgttttaagggcaaatcctgctaagggcagagtaaccacacagtgaggataaaggcacacagatcagatgcagtcaaataaagctggctaactaataattagcctatcaggtagccgcagcagcagtcagtgtgtcagctttttgcaaaataaggcacgttaatgcacacgctttcactgaagtgtaataggttctgcctctcagctgcacagggctacattyacacatgcaaacagaaagcgttagtttagccctggggaggcaaaatctcagtacctctctcactctgtcatgatcagttgtgagctgataaccaaatgcagtgctttccaagctgttttgcagctcctttcccaaatgcacgctgatgtgtagccctcctttcccccagccatccaattattgtgttccaactgattacagaagttccaaacacaatcaatttttgcacttctcttttggttctttactgcctcaggaggtagaagccacatctcttttgagagttgaggtttgtctgt

SEQ ID NO: 93580 - DNA, 600 bp, Chicken  19866894412308_1
acacacttcttggagcgtgcactgggctgggctggggtgacagtgcagtactaccccacatgctctcatcaaggggcattactggttttgtgcttcagaggtggcttaaaagcaatttcaatcgtggtttcccatagagaagggggaggtttgcatcccttcctcacgctgccctactttttgctgattgatcctggattgtgaggagatgagacggggaggatcagagcagtccattctggctggacaaacccacaaagggcagagatgaaggcgcacaggctctctctgttgtttttkgggggggatgttgtttcagtggtggccttctcagtttgtaggtcagcagtgttcagtgggagggaggtgtcagtgcctcagtgcagcagccagcgtccccctcggccctacctygttaaagccttgactctcaactgcagtctgtttacccctcctctcctaactttgtctttctctctctcgcacgtccctcttttcctcctccccgattcccatagcggtgggcgtgcaaatcaagctggaattactccaacgcaagttctggatggccatgcagcaggtaggagcaccaccgagcgt

SEQ ID NO: 93581 - DNA, 600 bp, Chicken  19866894412308_2
atttcaatcgtggtttcccatagagaagggggaggtttgcatcccttcctcacgctgccctactttttgctgattgatcctggattgtgaggagatgagacggggaggatcagagcagtccattctggctggacaaacccacaaagggcagagatgaaggcgcacaggctctctctgttgtttttkgggggggatgttgtttcagtggtggccttctcagtttgtaggtcagcagtgttcagtgggagggaggtgtcagtgcctcagtgcagcagccagcgtccccctcggccctacctygttaaagccttgactctcaactgcagtctgtttacccctcctctcctaactttgtctttctctctctcgcacgtccctcttttcctcctccccgattcccatagcggtgggcgtgcaaatcaagctggaattactccaacgcaagttctggatggccatgcagcaggtaggagcaccaccgagcgtgcagacaacgcagtgctcttgttcagctgggccagggctgcagtgcatcatgcacagtggtggcatcttcataaaggctgcggtgaaattcatattaaaagattttgaaagtag

SEQ ID NO: 93582 - DNA, 599 bp, Chicken  19866894412309_1
  misc_feature (1)..(15): n is any nucleotide
nnnnnnnnnnnnnnnatggatgtttggactaggtgatcttagcagtcttttctaaccttaatgattctatgatagattttcctactgatcacaacagattctactcttcttagtcagaattcttgcatttcaactcattgctcaactcattgcatttcagcagtaactgttattattcctctatttgtcttgcatgtttgtctttggattttaaacatgattataaataccttttggtaagtgttatgaaagcctaagattctcatgatttaatgattcttcatgcactcaccctggtaygctccttttgactgaaaagcaaactagtttttgtaggatctaccataattaacattcagatgcaagttgaatcatccatcatatgatgaatagattagaaacagtaaatgaaaagtgatctgttataaactcrtagacttaaaaccagctaacacagagagtttgcccaatggcactttaatgcattagattaatttgctggaagactaaagaggaaagcaagatttcgtttcctaggggrgtaaaagcaatgtctcataagtcttaatcrcattcttactctgctgatcagctgtgtc

SEQ ID NO: 93583 - DNA, 600 bp, Chicken  19866894412309_2
ctcattgctcaactcattgcatttcagcagtaactgttattattcctctatttgtcttgcatgtttgtctttggattttaaacatgattataaataccttttggtaagtgttatgaaagcctaagattctcatgatttaatgattcttcatgcactcaccctggtaygctccttttgactgaaaagcaaactagtttttgtaggatctaccataattaacattcagatgcaagttgaatcatccatcatatgatgaatagattagaaacagtaaatgaaaagtgatctgttataaactcrtagacttaaaaccagctaacacagagagtttgcccaatggcactttaatgcattagattaatttgctggaagactaaagaggaaagcaagatttcgtttcctaggggrgtaaaagcaatgtctcataagtcttaatcrcattcttactctgctgatcagctgtgtccttttaagtaagactgaaaacaataggtcttttgaacaaggtaaatgtgtgtaagaactgcttacrttcttctcccacaaaattagggtacgtctgcttcccttaactgagagctgaaataccaaaataaaact

SEQ ID NO: 93584 - DNA, 600 bp, Chicken  19866894412309_3
tgttatgaaagcctaagattctcatgatttaatgattcttcatgcactcaccctggtaygctccttttgactgaaaagcaaactagtttttgtaggatctaccataattaacattcagatgcaagttgaatcatccatcatatgatgaatagattagaaacagtaaatgaaaagtgatctgttataaactcrtagacttaaaaccagctaacacagagagtttgcccaatggcactttaatgcattagattaatttgctggaagactaaagaggaaagcaagatttcgtttcctaggggrgtaaaagcaatgtctcataagtcttaatcrcattcttactctgctgatcagctgtgtccttttaagtaagactgaaaacaataggtcttttgaacaaggtaaatgtgtgtaagaactgcttacrttcttctcccacaaaattagggtacgtctgcttcccttaactgagagctgaaataccaaaataaaactttcacagttttttttttcactcaaaatagctatttaaaactcttgtcatcttttggtacctaaggctgcaggcagattttaaaagcctcctattccttctggccttat

SEQ ID NO: 93585 - DNA, 600 bp, Chicken  19866894412309_4
aatgattcttcatgcactcaccctggtaygctccttttgactgaaaagcaaactagtttttgtaggatctaccataattaacattcagatgcaagttgaatcatccatcatatgatgaatagattagaaacagtaaatgaaaagtgatctgttataaactcrtagacttaaaaccagctaacacagagagtttgcccaatggcactttaatgcattagattaatttgctggaagactaaagaggaaagcaagatttcgtttcctaggggrgtaaaagcaatgtctcataagtcttaatcrcattcttactctgctgatcagctgtgtccttttaagtaagactgaaaacaataggtcttttgaacaaggtaaatgtgtgtaagaactgcttacrttcttctcccacaaaattagggtacgtctgcttcccttaactgagagctgaaataccaaaataaaactttcacagttttttttttcactcaaaatagctatttaaaactcttgtcatcttttggtacctaaggctgcaggcagattttaaaagcctcctattccttctggccttattggtaatacagtgacagagtggaggcgatt

SEQ ID NO: 93586 - DNA, 600 bp, Chicken  19866894412309_5
gttgaatcatccatcatatgatgaatagattagaaacagtaaatgaaaagtgatctgttataaactcrtagacttaaaaccagctaacacagagagtttgcccaatggcactttaatgcattagattaatttgctggaagactaaagaggaaagcaagatttcgtttcctaggggrgtaaaagcaatgtctcataagtcttaatcrcattcttactctgctgatcagctgtgtccttttaagtaagactgaaaacaataggtcttttgaacaaggtaaatgtgtgtaagaactgcttacrttcttctcccacaaaattagggtacgtctgcttcccttaactgagagctgaaataccaaaataaaactttcacagttttttttttcactcaaaatagctatttaaaactcttgtcatcttttggtacctaaggctgcaggcagattttaaaagcctcctattccttctggccttattggtaatacagtgacagagtggaggcgatttctgtccagatataagtatttgacaccttcttgtccttgtggattatgtggaagattgaacttcaggctgttctcttatcaaacccagttagac

SEQ ID NO: 93587 - DNA, 600 bp, Chicken  19866894412311_1
taggcatatgcatcacaaagtgcatcaccactctttactgtattctgctaccagatttgtcatgcctgatgctagtggtctgaagctaagaagcttattttcaccaactccagtagagcttatttcaacccttcttattcagctctatttgacgtctgtaaatatggtctctcattaaaggctacacttcctgtaggtgaataaagatggatgatatattctgtttacttctattatgtggaaagaggaccatctttattttccaattagaaaaaaatctttgctggttcaagcacccaygaatcccatggggttatgccaacggttgatttgttcttgctaaatttggtgaaattctgcttcatgggaggggatgttatttacattgctgtgaacaactcaggtcttcagcatctacaggagactgtttcaaagggaaggctgttctgttctaagacattctcagccttatttgttgttcttattttattccctctgacaagtgcctcactggagcattttgatgcaagacacgtgaataaagcaatgtctgtggtcctataaaacaaaaccattttctcctactcaacccttttcccg

SEQ ID NO: 93588 - DNA, 599 bp, Chicken  19866894412312_1
  misc_feature (1)..(83): n is any nucleotide
nnnnnnnnnnnnnnnnnnnnnnnnnnnnnnnnnnnnnnnnnnnnnnnnnnnnnnnnnnnnnnnnnnnnnnnnnnnnnnnnnnnccaagtgagtggatccactgttcctctggtttaacccatcccgtggggattcttcaagcatccacaatattctggggaccacgggctgaatttcaaagctgagcaatttggtttttgcatgaagtggacattaacttacgagcagtcactcagacactcacacagatgctctggtggggctgagtcctgttcttttttcaggcataattacctgtcsgtggtaattggctgtaggatcccacccttactatgcaagacttggtttcagacctctgctatgagcaagatgaggaccaatctctctggttcactgcagacagtcacccgcagagggaaccccacctgcactgcgcagtcacagtggctttgaagctaagagcaggagmtggttatgtgatctcttggtcctttcactcttctgtctcagttctcagcacaggaaargaataagaaaatgttaaagaggaatatgaataaggaataagaaggaggttcggcagaaaatcctgggagtta

SEQ ID NO: 93589 - DNA, 600 bp, Chicken  19866894412312_2
tgaatttcaaagctgagcaatttggtttttgcatgaagtggacattaacttacgagcagtcactcagacactcacacagatgctctggtggggctgagtcctgttcttttttcaggcataattacctgtcsgtggtaattggctgtaggatcccacccttactatgcaagacttggtttcagacctctgctatgagcaagatgaggaccaatctctctggttcactgcagacagtcacccgcagagggaaccccacctgcactgcgcagtcacagtggctttgaagctaagagcaggagmtggttatgtgatctcttggtcctttcactcttctgtctcagttctcagcacaggaaargaataagaaaatgttaaagaggaatatgaataaggaataagaaggaggttcggcagaaaatcctgggagttattaagatgtcagagaagtttttttttctctgttggctgcaaaacatctgttttttcggcacctattaatgctgcccaaacagcctgcaggaaaacggccgttgcaggmtgtgtgtcccggtagtatcattaattcttccattttgcagggacacaagaggaaaaactgga

SEQ ID NO: 93590 - DNA, 600 bp, Chicken  19866894412312_3
gtcactcagacactcacacagatgctctggtggggctgagtcctgttcttttttcaggcataattacctgtcsgtggtaattggctgtaggatcccacccttactatgcaagacttggtttcagacctctgctatgagcaagatgaggaccaatctctctggttcactgcagacagtcacccgcagagggaaccccacctgcactgcgcagtcacagtggctttgaagctaagagcaggagmtggttatgtgatctcttggtcctttcactcttctgtctcagttctcagcacaggaaargaataagaaaatgttaaagaggaatatgaataaggaataagaaggaggttcggcagaaaatcctgggagttattaagatgtcagagaagtttttttttctctgttggctgcaaaacatctgttttttcggcacctattaatgctgcccaaacagcctgcaggaaaacggccgttgcaggmtgtgtgtcccggtagtatcattaattcttccattttgcagggacacaagaggaaaaactggaaggtgaggaaatttgttctgagagctgatcctgctttcttgcactactatgaccccac

SEQ ID NO: 93591 - DNA, 500 bp, Chicken  19866894412312_4
ccgcagagggaaccccacctgcactgcgcagtcacagtggctttgaagctaagagcaggagmtggttatgtgatctcttggtcctttcactcttctgtctcagttctcagcacaggaaargaataagaaaatgttaaagaggaatatgaataaggaataagaaggaggttcggcagaaaatcctgggagttattaagatgtcagagaagtttttttttctctgttggctgcaaaacatctgttttttcggcacctattaatgctgcccaaacagcctgcaggaaaacggccgttgcaggmtgtgtgtcccggtagtatcattaattcttccattttgcagggacacaagaggaaaaactggaaggtgaggaaatttgttctgagagctgatcctgctttcttgcactactatgaccccaccaaggtatgtgagcggggagttgacacccccagaaatcctcttgcagacctgaatatcataataaaatacaaggcaatta

SEQ ID NO: 93592 - DNA, 600 bp, Chicken  19866894412315_1
actaagctgattctgttggtcttatgttcaaaacacttatattgcagttgagtctgcatcaagaaacagttgagccttctgcatgaacccaacctacatattccgattattctgttattaatgtatagatattgctattttggcttagctcttggaaatgttgggcttctaacgtttgactccaggtgtcatggagtgttattcttactccaagtaagaatggtttcggagatcacctgggtttgcctctttaacattgtcaaagcaagtttctaattttcagtaggtccactggcactratgcctccttcctgctaaacagtagcccggctgactgtcccagatggctttctgctttcaagytgtattccaccaaaatcattccaggtagatgttttctgcttatgtcatgtttggctgcagaggtgcatgatgatgctctttccattcaaaagggaatgctttattttacaactcagagaaacaggatgatttcctgcgtgagataccctgaggattaatgaatctgtcaggatccataatcagtggcttagcagagctgacacatgaaaggactgcagtggtatgtgaaccacgttc

SEQ ID NO: 93593 - DNA, 600 bp, Chicken  19866894412315_2
aaacagttgagccttctgcatgaacccaacctacatattccgattattctgttattaatgtatagatattgctattttggcttagctcttggaaatgttgggcttctaacgtttgactccaggtgtcatggagtgttattcttactccaagtaagaatggtttcggagatcacctgggtttgcctctttaacattgtcaaagcaagtttctaattttcagtaggtccactggcactratgcctccttcctgctaaacagtagcccggctgactgtcccagatggctttctgctttcaagytgtattccaccaaaatcattccaggtagatgttttctgcttatgtcatgtttggctgcagaggtgcatgatgatgctctttccattcaaaagggaatgctttattttacaactcagagaaacaggatgatttcctgcgtgagataccctgaggattaatgaatctgtcaggatccataatcagtggcttagcagagctgacacatgaaaggactgcagtggtatgtgaaccacgttcaggcttgaaactatttctgtagttcagtcccagagacctggaatgaacattaactcagaattc

SEQ ID NO: 93594 - DNA, 600 bp, Chicken  19866894412318_1
cctcttatggatttgtgctcctgaagcatatgcctcctttacctggaactaagggcatccctatgggctttatattaagtaccacagaagcagcatttttaccagggaaaaccattaaatttgtgaatagaataatactttcgggttatttcttctgattctgaatatgtacagtgattgtatgtattgtaaattctaggaagagaaattctgacagctaatagagtggaaagtgttgaagacttggcctttgactggatctcaaagaatctgtactggacagaccctcgatacagaagyataagtgtaatgagacttgcagataaatctagaagagctattgttcagaatttaaataatcctcgatcaatagtggttcatcctgtcattgggtaaatagtctttgattctgtcttaaaattatgtgaacgagttaactttttgttcactgcactttgaagttatttaacactagccttaactcttcgactgtgtgcataagtcaaaaggatcaggagaaaattctttgtaatatttgtgcatatttgcaagtattacctggagaatgcatttttttgcttgattcttcctccttgtaga

SEQ ID NO: 93595 - DNA, 600 bp, Chicken  19866894412322_1
gtgtgtgtgtgtctcagcattgttatttcagccggacaattgccctgcagatcgagggaacaggctggagttcaagtgagcttggctcccagtgactcccttctcactcagtgctttcatccttgggtcattgtgtcccgtaccggtgtgcaccagcatacagatgctccatgtacctccctgtgctgtcctataggggcctatagggtgagaccccctagcctggctttggcagttgtgcaaagttttgcttcccgtgcatgcacagcccagcctagcaccaatgggtatcaagaggcrtggcatgctctgctcacatttgtgcgtgcctccgtgagcagctttggaggtgtgctcctgtgcataggggatgctgcagaggtggatgtctctgcaaaactcgagaaatggggatcagggcatttccctgacaaaatcacccgtggcctcaggagcaaagggcgtgattggctctgtcagtgctgccctgccaggacccaagtcttctctcaaagccatatttagaggcagcctaattttcacatcttaattttatttttctcacatctctccctgacacagacacacacatacacacaa

SEQ ID NO: 93596 - DNA, 600 bp, Chicken  19866894412325_1
acagaagtcacaggttttcctgatatttaacctgtatcttagaaactaacataggtatttttgatcctgcgcagttgaatggctcagatgcctgcaggtcctttccaaatgcacaatgcttggacttcttttaaagaaaacagcactgaagtctccagtgggaccgtttcaaagagttgaagaaccgtcacattattaatacataagaattgcacttcagtcatactgttaacatcacacaatcaggatactcttctatgaagaatcctcacttgcgtggagtgctgggattaatcacamacttgttttaagagcagggctgccatacccgagtgtacgcgatatatggtatgtgatggagattcaagctttgttgttgttgtaggagaatctcaaaaatacattaaatgcaggaaggatggaagggaatgcagctattcacgccaactactgacagaaccatttagaatgcttggaatgccacaggtcctcctcattgatttaaataattgaatcaaaaccccactacgaatcacactttattgaaaacacagtaaaaatgaaaacaaaaaacacttcttcctacaaaacactgaatgt

SEQ ID NO: 93597 - DNA, 600 bp, Chicken  19866894412326_1
aaaaaaaaaaaaaaaaaagtaccagcaattttcataacttagggaaatacagagctgcttgatgatatgtaaaaagatctggcttatttatttcagtattttctgctctgagtcacagtacaacatcccttctgctacagacagtatttttggcaaggtttggaaatgcatttcataaactgtatatatactctctattttacacttctctgattaaggatatatgaattaataatacttaagccttgcttgcagcaaaaagttttgctttgctgtgttatcttcttttctatacatctwttttcatatgattttactstgttcctactcttaaacctgaaagcatgcaagtagtaaatttcatgtgagctgaagcattctggtctttccacrtccttttatagcagttcattttaaagtaatgaaagctgtatacttcttgcggaacagtgaagtcaggaagtggtgcattgctgccaaggagactgctggtttcagaggatgtgatacatcaccagttgttgatcataacagatatttgctttatttttaygtgtctttagaaacacccactctgacaatttttcaaatgttatgtcc

SEQ ID NO: 93598 - DNA, 600 bp, Chicken  19866894412326_2
taccagcaattttcataacttagggaaatacagagctgcttgatgatatgtaaaaagatctggcttatttatttcagtattttctgctctgagtcacagtacaacatcccttctgctacagacagtatttttggcaaggtttggaaatgcatttcataaactgtatatatactctctattttacacttctctgattaaggatatatgaattaataatacttaagccttgcttgcagcaaaaagttttgctttgctgtgttatcttcttttctatacatctwttttcatatgattttactstgttcctactcttaaacctgaaagcatgcaagtagtaaatttcatgtgagctgaagcattctggtctttccacrtccttttatagcagttcattttaaagtaatgaaagctgtatacttcttgcggaacagtgaagtcaggaagtggtgcattgctgccaaggagactgctggtttcagaggatgtgatacatcaccagttgttgatcataacagatatttgctttatttttaygtgtctttagaaacacccactctgacaatttttcaaatgttatgtccaaatcatacatttaggaag

SEQ ID NO: 93599 - DNA, 585 bp, Chicken  19866894412326_3
cagtattttctgctctgagtcacagtacaacatcccttctgctacagacagtatttttggcaaggtttggaaatgcatttcataaactgtatatatactctctattttacacttctctgattaaggatatatgaattaataatacttaagccttgcttgcagcaaaaagttttgctttgctgtgttatcttcttttctatacatctwttttcatatgattttactstgttcctactcttaaacctgaaagcatgcaagtagtaaatttcatgtgagctgaagcattctggtctttccacrtccttttatagcagttcattttaaagtaatgaaagctgtatacttcttgcggaacagtgaagtcaggaagtggtgcattgctgccaaggagactgctggtttcagaggatgtgatacatcaccagttgttgatcataacagatatttgctttatttttaygtgtctttagaaacacccactctgacaatttttcaaatgttatgtccaaatcatacatttaggaagtttctagtgaaaagcaatatgatattcagaaattgtaaaaggtttccttaaaagacctg

SEQ ID NO: 93600 - DNA, 425 bp, Chicken  19866894412326_4
agcaaaaagttttgctttgctgtgttatcttcttttctatacatctwttttcatatgattttactstgttcctactcttaaacctgaaagcatgcaagtagtaaatttcatgtgagctgaagcattctggtctttccacrtccttttatagcagttcattttaaagtaatgaaagctgtatacttcttgcggaacagtgaagtcaggaagtggtgcattgctgccaaggagactgctggtttcagaggatgtgatacatcaccagttgttgatcataacagatatttgctttatttttaygtgtctttagaaacacccactctgacaatttttcaaatgttatgtccaaatcatacatttaggaagtttctagtgaaaagcaatatgatattcagaaattgtaaaaggtttccttaaaagacctg

SEQ ID NO: 93601 - DNA, 600 bp, Chicken  19866894412329_1
cgctgtcaacgctgcctccaaatccttcctgctcacaatatggaggagcccaaccatacttgcagtgacagttcttaagattgttacacactcctctgttatgacactttgttatgttacaatcataattcagcactgaaatattggtacacgtcctttcaatacaaatcttgttgctgccacacgttgtgccatcttccacagcccccccagtcagatgtaggcacccctaaatgatagtcaagaccccaacactttttacctccagcaggggtttggatgactgttatgtggttctgyaaagggagcaacctgtgtacgttttcacactgtagcctaccacataaggcattctcaacactgcacttagtaaagcgaatattgttacgactaccacaatttccaaaacggtcacctcgagtattcacttctttgaagcactctaaaggagcaggcctggcttgtctgccaaaaagatgcttgcactgtttactgtgggaagaacactttcctttatagcaataggcaccatcttcgcaaggggttccgtcttgtacatacaggtcttcctggcaccaaggggaggtcccattgcagtac

SEQ ID NO: 93602 - DNA, 581 bp, Chicken  19866894412332_1
gacgacttaaaattatgcatttctgtgcagcagtacccattaattcatttgaattattcatctgtagaatgttttacaactttatcttgtttcaccagttgcaccaagtatcactggttacaggattgttacaccaactctgtaaaagctgctctgtgtaatcattccttacagtgggccttattttacttttgagtatgttgcttaaatgatcttcattcatttggacacattcagattgttcccttgtcctgcttttattaaactgtgacaaagaaaagaaatgaaaattattgagakcacttcttagtatatccctctgtgtttcacaaccagagctgcagctgaaatgcaggcagtctcgagtgactgtaactataagcataaggggaaaatagagttctgctggtataaacacagcatctgcagcaaaattaggcctgtagggtatgaagtagattgtgattctgaaagtattcatttgtgtctactgttgcctttggtgttatacttactatgtgcagacaaagcttttgatgttctggtgtagagttcacctgtggctatcaggttgataaaga

SEQ ID NO: 93603 - DNA, 600 bp, Chicken  19866894412340_1
tcctcaaggcttatgaattcatgatatgtattaacactgaatctggagacattagtcatgaagtaaccaactccaggcctagctcgcctgcctccaaattagggaatgaggaagagaggacggtgtgatgggttatgcactgaatgcaggcacgtgggtatgaattcatctctgcagcaaccctgtgagatcctagagggtatccagagggttgcatgtgaagaggttaaactcttgaaacttgagacaattcattgtgagctatctgaaattcctttgaagagctatcatttggagaasagagctttggtgtttgtcttcttttccttgatcatgatagaagagaatttggacttgtgctttgagtgcattgtgcctatagatggggatgcattttctaaccactgttgtgaaaagcaytgcttcaacccaagtttcttaggcatttgggaaaaagaaaactgagagctttcactgaaaacggtcatctaaagcaaaaatttggggagcaaccttgttctgaatagaatcatcaaaaggtccaaggaaacagtaagagctgaactgttgactatgagcatgagtttacaaacaacccct

SEQ ID NO: 93604 - DNA, 600 bp, Chicken  19866894412340_2
cggtgtgatgggttatgcactgaatgcaggcacgtgggtatgaattcatctctgcagcaaccctgtgagatcctagagggtatccagagggttgcatgtgaagaggttaaactcttgaaacttgagacaattcattgtgagctatctgaaattcctttgaagagctatcatttggagaasagagctttggtgtttgtcttcttttccttgatcatgatagaagagaatttggacttgtgctttgagtgcattgtgcctatagatggggatgcattttctaaccactgttgtgaaaagcaytgcttcaacccaagtttcttaggcatttgggaaaaagaaaactgagagctttcactgaaaacggtcatctaaagcaaaaatttggggagcaaccttgttctgaatagaatcatcaaaaggtccaaggaaacagtaagagctgaactgttgactatgagcatgagtttacaaacaacccctgaaacagcacgatgggctggtggtctacacgttcctttatttcaaggcaccctaataatctgccttgatttacaacttcctggccagagtctcaagctaaaagtgatgctatgcagagca

SEQ ID NO: 93605 - DNA, 600 bp, Chicken  19866894412340_3
ccttgttctgaatagaatcatcaaaaggtccaaggaaacagtaagagctgaactgttgactatgagcatgagtttacaaacaacccctgaaacagcacgatgggctggtggtctacacgttcctttatttcaaggcaccctaataatctgccttgatttacaacttcctggccagagtctcaagctaaaagtgatgctatgcagagcagaggtctttgttaggacaggaggggaccccaagagggatgcagcaactcgagggcactggggaggtgatgagaaacccccagccattggagygtcactgccccagacacgctcacagcaagctccaaggaggtggagtgtgaagctgaaggtggatgtgtaggggagcatgaagaatcacaaagtgtttatttgaggcgggcacagttgcaacaagagagttattttgcggatgagcaagcatctgtcgctctgtttgcacgactggtaacggcagaatgaagccattcgtgcagaatggagcctcccagcaaatgcatgttatcacatcccaggtgcctagggtgtgggttcagggtatgtcgccacttgcaaatgcacccgcttccaatg

SEQ ID NO: 93606 - DNA, 599 bp, Chicken  19866894412369_1
  misc_feature (1)..(54): n is any nucleotide
nnnnnnnnnnnnnnnnnnnnnnnnnnnnnnnnnnnnnnnnnnnnnnnnnnnnnnccttatgtgacacagtgataagagtgggaagatcctgctgctgtgggcttgggctgttggggtgggggacatatggtgatggcagcccagtaagtggctgctagagagagggaactgggcacagggacatcatgtcctctgaacgtctctgtttggagatcctggggttaggatcagggagcgtgtgcagattgctcattaagaatgttaaatgactttgttatatgtagcaaagaattgtctgcmagtcaaaataggacttcttgtcatctcttatccactttatttatgcgtaagagaaatgccactgaagtgctgtaccttctggtccaatctgttcatagcattctcttgctgtttgcatgtagcttcgggagaggcttctgaatgttttgcaaggctgtggaaaagtgactgtgaaagcacttcaaagcccttataacttctctccaarggcttagatttcagattaacagtgtccttaacagcaaaaacatgaactgccttgaactgatataaaacatatctcactaccggcatgaaat

SEQ ID NO: 93607 - DNA, 600 bp, Chicken  19866894412369_2
ggagatcctggggttaggatcagggagcgtgtgcagattgctcattaagaatgttaaatgactttgttatatgtagcaaagaattgtctgcmagtcaaaataggacttcttgtcatctcttatccactttatttatgcgtaagagaaatgccactgaagtgctgtaccttctggtccaatctgttcatagcattctcttgctgtttgcatgtagcttcgggagaggcttctgaatgttttgcaaggctgtggaaaagtgactgtgaaagcacttcaaagcccttataacttctctccaarggcttagatttcagattaacagtgtccttaacagcaaaaacatgaactgccttgaactgatataaaacatatctcactaccggcatgaaatgactaaatgcaaactcctttttctttctttgtacaaaacattagaagttcataattttgttaatgaataacattatactttcaaatctttgtttaaaatctgtctggactgcagaacaaatatctgcttgagctactaagctgttgccactgatgaaggataagacagatcttggtagcgtctcattagctgctatgtgaaagctgctt

SEQ ID NO: 93608 - DNA, 600 bp, Chicken  19866894412374_1
ggaattgaaagggggcggggacttgattcgaattgattctgctaaatgaaagagggtttgattttgtgattctacctggacggtttagattctgcttacattccacaggagcattcttttgtggtaagaaagacataggtgccagactccttgtcagcaagacaatgaggaaaagtgtttacttcaccccaagggaccaccagatggggatgcgaccacccagaggagaatacaccgcatgcgctggaggggagggacttgattaatgaatatgcagtagtgttcaacgtaacctgttgmatatgtatgaacttgacttacaaatatgtaacatttctgtgaactggtatgcaagttaggaggagctatccccattgcatccaactctgcgcagcgttgattaaaacatacctgattgtacaactactttgtggttatagagtttgattccgcaagtcagaatgactctgaatcagtccttaaattaagaagctaaaaaaaagaatataacttatatcaagaaaaagcctaaggaacttatgattgtttcttttggaagggaagccttacttcacagaccagactgccagactgtcaaag

SEQ ID NO: 93609 - DNA, 600 bp, Chicken  19866894412379_1
agacattacagtatctgtaaaactgacttaccttttcttttctaaacactatttttcatgaattattgccccatctgcttcaaaatgcattgacctgaaacatggcatacaagttagtagcctagaagtaatgttttatgttcataaaagaaacagcatattgaggctatgtgcaagcacagaaaacagaaaaatcttaatttgggtttccttcaagtgctcttctagtgatcaattcataacaagaaggaaacctacgtattcaaaatctagtcctgcagttcaactacacaaaacttrctgttggcttatcctctaaactgtatgaatgtaagagttctaatgggaraattggcttgtgtgagtaaaatacagccaaagctaaaaaatcctaatgaaatttaaagaatatttcaatatctgcctttcagaacacattttaattctagaaactcgatggaatcagaaattagctagcagtaaatgtttttgataactatgtccaaaaagattctttacagtaaacttaaatagtaaccgaagaagatataacatcaccaatctttgatatcctgggggtggtttgtggacacggaatta

SEQ ID NO: 93610 - DNA, 600 bp, Chicken  19866894412379_2
tatttttcatgaattattgccccatctgcttcaaaatgcattgacctgaaacatggcatacaagttagtagcctagaagtaatgttttatgttcataaaagaaacagcatattgaggctatgtgcaagcacagaaaacagaaaaatcttaatttgggtttccttcaagtgctcttctagtgatcaattcataacaagaaggaaacctacgtattcaaaatctagtcctgcagttcaactacacaaaacttrctgttggcttatcctctaaactgtatgaatgtaagagttctaatgggaraattggcttgtgtgagtaaaatacagccaaagctaaaaaatcctaatgaaatttaaagaatatttcaatatctgcctttcagaacacattttaattctagaaactcgatggaatcagaaattagctagcagtaaatgtttttgataactatgtccaaaaagattctttacagtaaacttaaatagtaaccgaagaagatataacatcaccaatctttgatatcctgggggtggtttgtggacacggaattatttaaatactataacaggaagagagaaagggaggaagaaaacaggctta

SEQ ID NO: 93611 - DNA, 600 bp, Chicken  19866894412379_3
gaaacttgccaaggagagagttagcaattcctcttttttgttgttttgttttgtgtggttttatcctttgaaataaggggtaatctcaggcactgttccctgtccactgttaaatcacactgctaaatacagactgtgcaagcttccagcattgtcctgaccctaccacgcgcagtgcccacaggcattggctccacttgaaaattaagttctttaaaccagaggatggtaaatttacggactggaatccacactacattatagcatatgatttagacaacactagtgtctaaacaattryaacaattataaaccccagtgtgaagtatatatgtcgaggaagagttctcagacttaagcagcttcaaaacttgctcataaagccttgccagctgccagattcaactcagtctcctaggcacagaaaccaatctgcatgggttcacttgaggttacccggcaagtctagacgactccagctttagattatcaaaagacatgcaaaactacactgaacaggaatggaccaacttataattctgttctaacgttcttccaaactgatttgtcacatagcagtttttaaaaccatagatagca

SEQ ID NO: 93612 - DNA, 600 bp, Chicken  19866894412379_4
aaacttgccaaggagagagttagcaattcctcttttttgttgttttgttttgtgtggttttatcctttgaaataaggggtaatctcaggcactgttccctgtccactgttaaatcacactgctaaatacagactgtgcaagcttccagcattgtcctgaccctaccacgcgcagtgcccacaggcattggctccacttgaaaattaagttctttaaaccagaggatggtaaatttacggactggaatccacactacattatagcatatgatttagacaacactagtgtctaaacaattryaacaattataaaccccagtgtgaagtatatatgtcgaggaagagttctcagacttaagcagcttcaaaacttgctcataaagccttgccagctgccagattcaactcagtctcctaggcacagaaaccaatctgcatgggttcacttgaggttacccggcaagtctagacgactccagctttagattatcaaaagacatgcaaaactacactgaacaggaatggaccaacttataattctgttctaacgttcttccaaactgatttgtcacatagcagtttttaaaaccatagatagcat

SEQ ID NO: 93613 - DNA, 554 bp, Chicken  19866894412379_5
cgactccagctttagattatcaaaagacatgcaaaactacactgaacaggaatggaccaacttataattctgttctaacgttcttccaaactgatttgtcacatagcagtttttaaaaccatagatagcatgtaagacgtgtaagatgttttttcaactggctgcgtgctgttttttaatcacctttggaaaatcgatgtggcttggtgttctcacgtgaacaagaggaaaatttgctgctacttttttctcccgtgggtgctaatatatgaaggttaacttcaccaaattttgtcactkcatttccttacaggtctggcatgacataattaaaagctttggtgactcactgtagtttaacattttcacagccagtyctgtgcaataccagcgagcacttctattcctgagacaatgaccgtgataactgctgttggatgaaggtgagctgaaaatacgaatgaagactttcaaatatatttctgtttaaaaaatatttgtgtcttcaaagcatgaaacatctgccaaatggcagcaaacacttctcaaagaga

SEQ ID NO: 93614 - DNA, 477 bp, Chicken  19866894412379_6
acgttcttccaaactgatttgtcacatagcagtttttaaaaccatagatagcatgtaagacgtgtaagatgttttttcaactggctgcgtgctgttttttaatcacctttggaaaatcgatgtggcttggtgttctcacgtgaacaagaggaaaatttgctgctacttttttctcccgtgggtgctaatatatgaaggttaacttcaccaaattttgtcactkcatttccttacaggtctggcatgacataattaaaagctttggtgactcactgtagtttaacattttcacagccagtyctgtgcaataccagcgagcacttctattcctgagacaatgaccgtgataactgctgttggatgaaggtgagctgaaaatacgaatgaagactttcaaatatatttctgtttaaaaaatatttgtgtcttcaaagcatgaaacatctgccaaatggcagcaaacacttctcaaagaga

SEQ ID NO: 93615 - DNA, 600 bp, Chicken  19866894412381_1
tccctctcatcctgttgctgttacctgggacctcccacctcgccacagtctcctttcagctgtagagagcaataaggtctcccctgagcctccttttctcctaactgaagcatcccagttccctcagccgctccccatcggacctctgcttcagacccttcagttctgttgcccttctctagacatgctccaggaactcaatgtctttcttgtagtagaagcatctgccacgggtctcctggcatgagacagctgctctgagtatgcatggaacaggagaactgcaagggtctatttacyrttgggttctccaccctcttgcagcgtttgagcttaagttatccatccatctgtctgtggtcccttgcatgctgtctaccccatcacgcaggtgygaggctggctactacggagaccccatcctgggctcaggtgaccactgccgcccytgtccttgccccgacggccctgagagtggacggcagtttgccagtggctgttaccaggacccggtcaccctgcaggtcgtgtgtgtctgtagcacaggatacataggtaggctgcctgtgccttgagtgcaatccagtgagcatctcccca

SEQ ID NO: 93616 - DNA, 600 bp, Chicken  19866894412381_2
ccctctcatcctgttgctgttacctgggacctcccacctcgccacagtctcctttcagctgtagagagcaataaggtctcccctgagcctccttttctcctaactgaagcatcccagttccctcagccgctccccatcggacctctgcttcagacccttcagttctgttgcccttctctagacatgctccaggaactcaatgtctttcttgtagtagaagcatctgccacgggtctcctggcatgagacagctgctctgagtatgcatggaacaggagaactgcaagggtctatttacyrttgggttctccaccctcttgcagcgtttgagcttaagttatccatccatctgtctgtggtcccttgcatgctgtctaccccatcacgcaggtgygaggctggctactacggagaccccatcctgggctcaggtgaccactgccgcccytgtccttgccccgacggccctgagagtggacggcagtttgccagtggctgttaccaggacccggtcaccctgcaggtcgtgtgtgtctgtagcacaggatacataggtaggctgcctgtgccttgagtgcaatccagtgagcatctccccat

SEQ ID NO: 93617 - DNA, 600 bp, Chicken  19866894412381_3
ttctcctaactgaagcatcccagttccctcagccgctccccatcggacctctgcttcagacccttcagttctgttgcccttctctagacatgctccaggaactcaatgtctttcttgtagtagaagcatctgccacgggtctcctggcatgagacagctgctctgagtatgcatggaacaggagaactgcaagggtctatttacyrttgggttctccaccctcttgcagcgtttgagcttaagttatccatccatctgtctgtggtcccttgcatgctgtctaccccatcacgcaggtgygaggctggctactacggagaccccatcctgggctcaggtgaccactgccgcccytgtccttgccccgacggccctgagagtggacggcagtttgccagtggctgttaccaggacccggtcaccctgcaggtcgtgtgtgtctgtagcacaggatacataggtaggctgcctgtgccttgagtgcaatccagtgagcatctccccatctaacagcccttatttccatttacggggctgtgcgctcgtgagcggtgatggtaattcatgtcgtgctgcttgttcaaacaggcagtcgctgtg

SEQ ID NO: 93618 - DNA, 600 bp, Chicken  19866894412381_4
ttcagacccttcagttctgttgcccttctctagacatgctccaggaactcaatgtctttcttgtagtagaagcatctgccacgggtctcctggcatgagacagctgctctgagtatgcatggaacaggagaactgcaagggtctatttacyrttgggttctccaccctcttgcagcgtttgagcttaagttatccatccatctgtctgtggtcccttgcatgctgtctaccccatcacgcaggtgygaggctggctactacggagaccccatcctgggctcaggtgaccactgccgcccytgtccttgccccgacggccctgagagtggacggcagtttgccagtggctgttaccaggacccggtcaccctgcaggtcgtgtgtgtctgtagcacaggatacataggtaggctgcctgtgccttgagtgcaatccagtgagcatctccccatctaacagcccttatttccatttacggggctgtgcgctcgtgagcggtgatggtaattcatgtcgtgctgcttgttcaaacaggcagtcgctgtgatgaatgtgcgtctggcttctttggcagccccgacgaggtcggcggcgcctgcc

SEQ ID NO: 93619 - DNA, 402 bp, Chicken  19866894412381_5
cagtgagcatctccccatctaacagcccttatttccatttacggggctgtgcgctcgtgagcggtgatggtaattcatgtcgtgctgcttgttcaaacaggcagtcgctgtgatgaatgtgcgtctggcttctttggcagccccgacgaggtcggcggcgcctgccagccctgccagtgcaataacaacattgacagcaccgatcctgaagcctgcgacaagaggacagggacgtgtgtcaagtgcctgtaccacacagagggtgaaaactgccatctctgtaggcagggctactatggsagtgccctgcagcaggactgcagaagtgagtggggaggtgcaccaaacaacagccaccagagctctttataattgacctgagacctttgggggggggggagg

SEQ ID NO: 93620 - DNA, 600 bp, Chicken  19866894412383_1
aacaacaataatagtaaatcatagaccagtgcaacttgtgaggggttttttgttttgtgcttcttagtgtatgccccatacatattaccagaagttcagtctctgttttaagtgctgtgtctgcctagaaacatgaacggagatttaaaagacctttagagaacttgaagaatgaaaagcttttactacttggctttttttcctctcatctgccatttttcctcctataaccctcaaaactagaaggcaaaacatcattgggtagtttaattaagaaaaaaaaaaaaaaagaaaaacatyttgttagtgactaatccttaaacttcattatattaagttctaaatcttaagtcagtgatttatgattctcttcttttgtaggctgttctttacaatgacagatcagtcttagaaaatcaccacgctgcttctgcctggaatcttttcttatcacgaccagaatacaactttttatcaaatcttgatcacgtagagtttaagcgttttcgtttcttagtgattgaagcaatccttgccacagatctcaagaagcattttgatttccttgcagaatttaattccaaggttagttacatttta

SEQ ID NO: 93621 - DNA, 600 bp, Chicken  19866894412387_1
caaacacagatctgttgagaaattcattatgggtcctagttcaatatagcctcttcacatcttgcagttgttttcaaatcctttaatctcagcagttctcaagagttgattttggctcatggctcttctgcagaaaggtgtttatttaaactggccggctccaacagttaatgcagcatttctgaaattgccactgagcctaaattaagttgtcagagtcaacatacagccctagtgagcctattaaaatcttaataacttttaaaattgagctctgggtagcaaacgttgtcctgtgcrttagattttgagtagataaatccattaaactatgttctattgcttttcttttctttgtcacgagcaacccaraagtggagataagaggaatttttagaaatgcattgagtacctctaatattggaacgtcgcaaaggacttgtccttgaactgtatgctgctcatccaaataaaggaaaactttctacttttcattggttctccatactactggtgtttggaattttgtgcctgtgtggaagcctgttggttttaatgaggcaatagtgtggtgagaacagctgtagtgcttgtttgttg

SEQ ID NO: 93622 - DNA, 600 bp, Chicken  19866894412387_2
ttcaaatcctttaatctcagcagttctcaagagttgattttggctcatggctcttctgcagaaaggtgtttatttaaactggccggctccaacagttaatgcagcatttctgaaattgccactgagcctaaattaagttgtcagagtcaacatacagccctagtgagcctattaaaatcttaataacttttaaaattgagctctgggtagcaaacgttgtcctgtgcrttagattttgagtagataaatccattaaactatgttctattgcttttcttttctttgtcacgagcaacccaraagtggagataagaggaatttttagaaatgcattgagtacctctaatattggaacgtcgcaaaggacttgtccttgaactgtatgctgctcatccaaataaaggaaaactttctacttttcattggttctccatactactggtgtttggaattttgtgcctgtgtggaagcctgttggttttaatgaggcaatagtgtggtgagaacagctgtagtgcttgtttgttgcctattgcttcatagcctgtagtgcattctgaagttaggaaagaagctgtcaattgcgtttataatcagcat

SEQ ID NO: 93623 - DNA, 600 bp, Chicken  19866894412395_1
taagataccatttagctttctatttaatgtacatttttgaagtgttttcacttatggcaaatgatgtttaccacttccccttttgacattattctttaacagattattactttaatagtccacagtggatgacagtaacactcttgagttgcgtattggttgcttaacagatgtaattgcatgacaaaaaaaaaacttgcagctgttcatcaggtccttcaatgcagattattaaggaggtcagttacgagtgatttgaagtccctcacttcacaagaaggctgagtgccccctcagcarctctcattttgcactgcctttgcatcagacatttcagtgatcagcagcagtctaatttgcattctttataattctgaatctctgaattgtcacctgaggcgatcattttwatgccctgacaaggtaagtgattgcagtatcatatcctttccaagttcatctttagtgatgtcttaacactgccttctgtacttcagtattaatgtctttttttccttttttcttccttgtaaacaataatttgagaattcagtggagttctccttaagcttatcttcctgagcttttcatgtattatca

SEQ ID NO: 93624 - DNA, 600 bp, Chicken  19866894412395_2
tttaatagtccacagtggatgacagtaacactcttgagttgcgtattggttgcttaacagatgtaattgcatgacaaaaaaaaaacttgcagctgttcatcaggtccttcaatgcagattattaaggaggtcagttacgagtgatttgaagtccctcacttcacaagaaggctgagtgccccctcagcarctctcattttgcactgcctttgcatcagacatttcagtgatcagcagcagtctaatttgcattctttataattctgaatctctgaattgtcacctgaggcgatcattttwatgccctgacaaggtaagtgattgcagtatcatatcctttccaagttcatctttagtgatgtcttaacactgccttctgtacttcagtattaatgtctttttttccttttttcttccttgtaaacaataatttgagaattcagtggagttctccttaagcttatcttcctgagcttttcatgtattatcaaagagttcagatttcctaattcaaaaacactttttttctttaagttctgtttaaaataaagtgtgagtggctaatgggagctgacaaggctggggagccctttgtgatat

SEQ ID NO: 93625 - DNA, 599 bp, Chicken  19866894412396_1
  misc_feature (1)..(57): n is any nucleotide
nnnnnnnnnnnnnnnnnnnnnnnnnnnnnnnnnnnnnnnnnnnnnnnnnnnnnnnnntctggagtgaagccccaagggagattactgagttgtcatacagcaattcctctcagaagccctgctacaagacctgcctgacgcacgggcatgtgcaacaaaggaaagatgaggtccccaagtagtctgaggagtttcttctcagtctttgatcactgacaaccaaaaataacttgttgctttgagtatctggagaatgaaacccatgctgatttttcacaatttttcatgatagaaacctcycaatttcacctttacagacagtagggagaatggagaggttttatgggatattcttactctttttgcatatctggaccatagcatatttttcctaagcaacaaagatgactgaatcaatttggttattttagaacctcctggcgtgcagtattactcctgtgctttttggatgttctgttttattacagcagccaggatgtttacttgttcagtaattcagaactttattattgcaatgaatcatgaactatgagttaccaacttcaaagaagacccagtgaaattttaaaaacaacctg

SEQ ID NO: 93626 - DNA, 600 bp, Chicken  19866894412396_2
tttacagacagtagggagaatggagaggttttatgggatattcttactctttttgcatatctggaccatagcatatttttcctaagcaacaaagatgactgaatcaatttggttattttagaacctcctggcgtgcagtattactcctgtgctttttggatgttctgttttattacagcagccaggatgtttacttgttcagtaattcagaactttattattgcaatgaatcatgaactatgagttaccaacttcaaagaagacccagtgaaattttaaaaacaacctggagaagaataraagtattttatgctcaatttatgctcaaacttagtaagaacctgagtctttgcagttttgcaattttcttgtacatgcatccttttcagtagatttcaaaagttaaatgactgcgacaacaattttgtcccttgttaatgtgcagttcttgtagaccgaccagcagtgtccttttaaaggtacttataaaacaactatttccattcttcattacgccaatatatcatgtatacaatcctcataaattaacaaaatagtaataacacaagaatatcaagcagttctcaatgcttgatgact

SEQ ID NO: 93627 - DNA, 600 bp, Chicken  19866894412405_1
tccagtaaaaaagggaacatcttatacgagatgtcagagtgcaggtgtataacctttgacattttgttttttttttcattagttggtttagtcacttttggtgcccatttaagcctttgatatccacaaattaatgtgtcaaaaaatgctcagcagactgtagcttgtcacgaaattccttgaaattggctacctgctcatctcactcagcactgttctttcattgtaagaaatatgcaatcataatttcctgttcatctgtttgtagaccaagtgctatcactttcctagatgaaagtyctattatgtttcatgtcttctcacacagaatctctgggatggccagccttgtcactctaccatgtcttttccaatgttgtgttgtcatactggagaaggcggaagaccagatttgcatgtggcgtttgtatttttacagtagtaacatagaggatttctgctgtattctcrattctctctgcaagagtctccaagattccattcatttttttaatgtctgaacagtgagttgatacctgaagtgaaacccgatgcagcagtatgggcttggtgaagagtggctggaaggctgcatggcaa

SEQ ID NO: 93628 - DNA, 600 bp, Chicken  19866894412405_2
gaaattccttgaaattggctacctgctcatctcactcagcactgttctttcattgtaagaaatatgcaatcataatttcctgttcatctgtttgtagaccaagtgctatcactttcctagatgaaagtyctattatgtttcatgtcttctcacacagaatctctgggatggccagccttgtcactctaccatgtcttttccaatgttgtgttgtcatactggagaaggcggaagaccagatttgcatgtggcgtttgtatttttacagtagtaacatagaggatttctgctgtattctcrattctctctgcaagagtctccaagattccattcatttttttaatgtctgaacagtgagttgatacctgaagtgaaacccgatgcagcagtatgggcttggtgaagagtggctggaaggctgcatggcaaaaaaggccctgggggtgctgctcaatagacatctgaatgtaagccagcaatgtgcccaggtggccaagaagacctaaggtcctggcccacatcagaaatcgtttggctagcagaactagggaagtgatcgttccttagtacttagcactgtttagttttgggcccttcact

SEQ ID NO: 93629 - DNA, 600 bp, Chicken  19866894412410_1
caatgaaaccataattctgtttcagtcgggagaatgttttttgattgctattgatggttagtattggttaaatggcttgaagataattaaagaattcagaaacatggtgctcctctaactgttttgtgtttctagcctcttgtgcaactgcccatagtgaatggaagtgggacagtgaatttttctgacatgttggtttcaaattcttgtgtcgaaagcagcatgtgttgttagagcatacctcctataaagggtagtttgttccttttaacttgtgacttcagtttaagagtaattccmagtttacaataaaaactygatctagcattcagtgctaaccatctgtgctgcagtttccttcagcaattctgaggcagtatttttacccttaaaacaacctttcttaggttctcaagcaatgaggccgttgcttgaacatactttaagaaacaaagctattgaagtaagttaatatacatgttatatttgaagcaagtgttttgtgttacttgtgatttggtttggtagtgcatctgctgttatactggtatcttactcatattttcatgatcagataaattgtaacttttgcctcattta

SEQ ID NO: 93630 - DNA, 600 bp, Chicken  19866894412410_2
gtttcagtcgggagaatgttttttgattgctattgatggttagtattggttaaatggcttgaagataattaaagaattcagaaacatggtgctcctctaactgttttgtgtttctagcctcttgtgcaactgcccatagtgaatggaagtgggacagtgaatttttctgacatgttggtttcaaattcttgtgtcgaaagcagcatgtgttgttagagcatacctcctataaagggtagtttgttccttttaacttgtgacttcagtttaagagtaattccmagtttacaataaaaactygatctagcattcagtgctaaccatctgtgctgcagtttccttcagcaattctgaggcagtatttttacccttaaaacaacctttcttaggttctcaagcaatgaggccgttgcttgaacatactttaagaaacaaagctattgaagtaagttaatatacatgttatatttgaagcaagtgttttgtgttacttgtgatttggtttggtagtgcatctgctgttatactggtatcttactcatattttcatgatcagataaattgtaacttttgcctcatttagattttagctttcaaaaa

SEQ ID NO: 93631 - DNA, 600 bp, Chicken  19866894412413_1
tgaacttattttggctttgtgtgggggaaggatcagatcactgaagtatttgttaagttcctacactgccagagcaatgctgaacctgaagcttccaggtcttgctccgcaccatttcctcctcactctcacccagcaggtgctcagccttggcctcccatggtttttctagtccagcagtggcaggcggggaagcttttactcaacctattgaaataggaagacaaagatttggaggatcatcatggtttgtttgctttccctgcaggcaaactgttgggaatgggattttgtcactgyaccttcagaagggatgtctgatgtgttgagggcacagggaaatggcagtgaagaagctgtgcagctctgcaatcattcaaaaccatcagcaaaaaaattatagatctggaagattgagttactttgtaaaggcatggttgcaaarctcacctrtctcagaagaatggtgctttttgtcaccagcttttttttaagtatgtgataattgaatatctgtgggagtaacatgaagctaaacagggcctggctacaaaatgatgttcctgcttaatgaagttctaaatgaagaacttgcatttt

SEQ ID NO: 93632 - DNA, 600 bp, Chicken  19866894412413_2
agccttggcctcccatggtttttctagtccagcagtggcaggcggggaagcttttactcaacctattgaaataggaagacaaagatttggaggatcatcatggtttgtttgctttccctgcaggcaaactgttgggaatgggattttgtcactgyaccttcagaagggatgtctgatgtgttgagggcacagggaaatggcagtgaagaagctgtgcagctctgcaatcattcaaaaccatcagcaaaaaaattatagatctggaagattgagttactttgtaaaggcatggttgcaaarctcacctrtctcagaagaatggtgctttttgtcaccagcttttttttaagtatgtgataattgaatatctgtgggagtaacatgaagctaaacagggcctggctacaaaatgatgttcctgcttaatgaagttctaaatgaagaacttgcattttgcttgtatttgagctacttaattgtatggtcattgcatatatcttttaaaaatctttcggcgtttccattgagattggatagcaagataataacaagtatgtctgaatcccagagagaaagtaaacagggtgacaaatcttaagg

SEQ ID NO: 93633 - DNA, 600 bp, Chicken  19866894412413_3
cctcccatggtttttctagtccagcagtggcaggcggggaagcttttactcaacctattgaaataggaagacaaagatttggaggatcatcatggtttgtttgctttccctgcaggcaaactgttgggaatgggattttgtcactgyaccttcagaagggatgtctgatgtgttgagggcacagggaaatggcagtgaagaagctgtgcagctctgcaatcattcaaaaccatcagcaaaaaaattatagatctggaagattgagttactttgtaaaggcatggttgcaaarctcacctrtctcagaagaatggtgctttttgtcaccagcttttttttaagtatgtgataattgaatatctgtgggagtaacatgaagctaaacagggcctggctacaaaatgatgttcctgcttaatgaagttctaaatgaagaacttgcattttgcttgtatttgagctacttaattgtatggtcattgcatatatcttttaaaaatctttcggcgtttccattgagattggatagcaagataataacaagtatgtctgaatcccagagagaaagtaaacagggtgacaaatcttaaggtctgaagt

SEQ ID NO: 93634 - DNA, 600 bp, Chicken  19866894412418_1
aacattcaaggaaaacagcataaggatagttatggaggaatgaaggctccacagcctggcactcccaaaagcaacaactgctggtcccgatgactgcccagaactcctctctgccccccaaacaaatgctgtcctatcaagaagtcagggctctaaatacagcctataggcaccttctgtatttgcagttggtttaggtgtttgctttagatggcatttcctcagctgcaaaagactgcagacctagtcagggggagcccttcaacctgatgcatctggagaaacatttatattatttgycatggtgatttagttctgttaccaacaaactaaaaacaggaataattttgattcacagctgtccccagcaatggcacaggagtacctggagtgaggtctggcccatgctctcatttcctcatattcactgacagacaggaatggaaagaatgcctgtcccmattctgtagtcttctctttgatggtctgagtccacaaagggccgttagctgctcggtgctggacaacctatagtgggtaggaggtggaaataagargttcttgtcccactaggactccagagtatgagatgcacaacta

SEQ ID NO: 93635 - DNA, 600 bp, Chicken  19866894412418_2
gcctataggcaccttctgtatttgcagttggtttaggtgtttgctttagatggcatttcctcagctgcaaaagactgcagacctagtcagggggagcccttcaacctgatgcatctggagaaacatttatattatttgycatggtgatttagttctgttaccaacaaactaaaaacaggaataattttgattcacagctgtccccagcaatggcacaggagtacctggagtgaggtctggcccatgctctcatttcctcatattcactgacagacaggaatggaaagaatgcctgtcccmattctgtagtcttctctttgatggtctgagtccacaaagggccgttagctgctcggtgctggacaacctatagtgggtaggaggtggaaataagargttcttgtcccactaggactccagagtatgagatgcacaactagcacgtaagcttagaaaaataaaaatgaacatacagcagacatccagcagaaatttcttttagcggagcttcaagagggaaagaggggccaactgcctatctgtgtccagagctgctttccgacttagacagatttgacctttttaaagggcttaaaaatg

SEQ ID NO: 93636 - DNA, 593 bp, Chicken  19866894412418_3
cccttcaacctgatgcatctggagaaacatttatattatttgycatggtgatttagttctgttaccaacaaactaaaaacaggaataattttgattcacagctgtccccagcaatggcacaggagtacctggagtgaggtctggcccatgctctcatttcctcatattcactgacagacaggaatggaaagaatgcctgtcccmattctgtagtcttctctttgatggtctgagtccacaaagggccgttagctgctcggtgctggacaacctatagtgggtaggaggtggaaataagargttcttgtcccactaggactccagagtatgagatgcacaactagcacgtaagcttagaaaaataaaaatgaacatacagcagacatccagcagaaatttcttttagcggagcttcaagagggaaagaggggccaactgcctatctgtgtccagagctgctttccgacttagacagatttgacctttttaaagggcttaaaaatgtaatactttgttttgcttctgttcacctccttgaatgcctgcttctcctcctctttccttatctaaaaattactctcaaaaagccttct

SEQ ID NO: 93637 - DNA, 600 bp, Chicken  19866894412419_1
tgaaattcttgatacaaatgcttctattactgttcttgtggtcagtgatttagtgctggttagtaagtaagccgctctgtacagtgcaaataaatgcctcctccatgcaggcacgtgagcatagattagctgcctgtacatcccttgctttgctatttacatttgtgctaaatgacttgtcaacactgagctgtgtcactgatcataaatgcgttcaaatacaccaagaggtttctgctgaagctttggttgccccacctggagctgactttgtgggaccgaggcagagctgctgactcycagctgaaaactgttagtgccatccccatatgggctgctgcacagtaaggcagtgctgcgctgtggaatgattagatgggggtgattttaacacaacattaaacctcaatcagctatacagttgctgtacagaacgctcggaaggtaaagactgaacatacagggagcagactgaaatgagttttgagggaatgcatccagggctctgagctggtttaagtaaagcagtgtaatgatgtggtttagggctaagcctcattcagcatgcctgcgggctgctgcacgctgaagtgttttcag

SEQ ID NO: 93638 - DNA, 545 bp, Chicken  19866894412421_1
gctgtacacagatcatttgtaaaatattggtgcacgtatccttctggatgtctaaatcaagttttaaaaagccaagttctgcttataaacggcaataggaatgtaactacagcaactaaaatacaccaagtgctatttcaggagtaaccagtaagattcacaagctttgaacatttctcatgccaacagctgttgtttttagtttttattttattgtggttcaatacagttttcaaattcccttggattttaaagtgtaaaacatacctgattcttcttatgtcatgctgagagagaagmtgatttggaataagttttgtttgtttcacatattaaaaattaagcaataaggcacaatgtggaggagcgattatctgatgataaccccagcttcctgaaattgctttattgcaaatataaataccttttagattgctcactggatattaagggtattagcgtgttcacagagtttaatatttccctttagaatattaaattcataaggctcttttttttttttttttttgtctacactacttttt

SEQ ID NO: 93639 - DNA, 600 bp, Chicken  19866894412426_1
gattagattccctagaatttgaaagaataaatcagaaaagtgcaaacagattattacactatggtttattttctgatgatgtatgtgttgcagatgctcagactatacttatgtatataagaaattcacgagtgacgattcacatcccttcacaagtttaaaatatctatttaatttatctatcttggtataaattattcatactgaacatgggcaagcctttacctaagtgtgcacatgtgcttgattaccatgtgaaaactggaagaattaggaaatacatctttcaaaaccttatcyaatcaatcatatgcttacaattccatcacctacttcataatcttctaagatttcttacttcatgcagtttgaaagagctgacattgaaaacagaataaaactaaacaaaatccaggaagatttttaaagattttacactgaactagaacaaccagcttttctggattaaaaaggccaaataaattaatgttggagccttttccatacaggcaatacatccctgaattttatttacttattttccctctcagtccaaactcaagaactctgcacatttgggcaaaagctgtgaaggtgtct

SEQ ID NO: 93640 - DNA, 600 bp, Chicken  19866894412426_2
tgaaaacagaataaaactaaacaaaatccaggaagatttttaaagattttacactgaactagaacaaccagcttttctggattaaaaaggccaaataaattaatgttggagccttttccatacaggcaatacatccctgaattttatttacttattttccctctcagtccaaactcaagaactctgcacatttgggcaaaagctgtgaaggtgtctaggtcaatatatttcaattcaatattttttcatatctagaaaatatgagtagtttatttatggatatgtcttaaatgctttgcyccttcaccatatcccttagatttaaatggtgtatcacttgggtggaaaaatgggttcataaaataagcccaacatctctaatgaaagctcttatatcatatgaaaaccaaaaatatgaatatagaaattagattattgaaaaagttttatcactttcagtctatgatggcctgtaatcatactagtggtatacagctgctttccaaacatgccagactggccaaaaagtgatatgttttagagaaacatccacaggagttcctgtaagtacctgtatttttgtgacaggaaaatcaaata

SEQ ID NO: 93641 - DNA, 599 bp, Chicken  19866894412432_1
  misc_feature (1)..(105): n is any nucleotide
nnnnnnnnnnnnnnnnnnnnnnnnnnnnnnnnnnnnnnnnnnnnnnnnnnnnnnnnnnnnnnnnnnnnnnnnnnnnnnnnnnnnnnnnnnnnnnnnnnnnnnnnnagtccagccattgcatttagaggcatagagtcgggatggtgagttccctcctgctgagcctgagtgtggtctcagcctgcccaactgtgaggtgcattcatttacctcactgcgaggcagaaggactcaacgtgctgccctgctcctgcagcacaccgactggcagcttgaggagtccattggatgactgtcctyrgctccaggtgctcgttaaagcctgcctcgatgtgctgcttggtctggagttactcaaacacttttctccatggctgtgagtttaaacagatcttgccatctcacttctcattctgtcctcacctgtgccaaaaaagcttgttttggggctgaaccagatgagggaaccgatccaggtcaaaaatagcttccctccccttttgaggcttatttctgacttggatccattccctaatccagttcagctcgtggccctgtgagcactgggctgacagcacagcttgttgatgctcaaagag

SEQ ID NO: 93642 - DNA, 599 bp, Chicken  19866894412432_2
  misc_feature (1)..(104): n is any nucleotide
nnnnnnnnnnnnnnnnnnnnnnnnnnnnnnnnnnnnnnnnnnnnnnnnnnnnnnnnnnnnnnnnnnnnnnnnnnnnnnnnnnnnnnnnnnnnnnnnnnnnnnnnagtccagccattgcatttagaggcatagagtcgggatggtgagttccctcctgctgagcctgagtgtggtctcagcctgcccaactgtgaggtgcattcatttacctcactgcgaggcagaaggactcaacgtgctgccctgctcctgcagcacaccgactggcagcttgaggagtccattggatgactgtcctyrgctccaggtgctcgttaaagcctgcctcgatgtgctgcttggtctggagttactcaaacacttttctccatggctgtgagtttaaacagatcttgccatctcacttctcattctgtcctcacctgtgccaaaaaagcttgttttggggctgaaccagatgagggaaccgatccaggtcaaaaatagcttccctccccttttgaggcttatttctgacttggatccattccctaatccagttcagctcgtggccctgtgagcactgggctgacagcacagcttgttgatgctcaaagaga

SEQ ID NO: 93643 - DNA, 600 bp, Chicken  19866894412432_3
agcctgcctcgatgtgctgcttggtctggagttactcaaacacttttctccatggctgtgagtttaaacagatcttgccatctcacttctcattctgtcctcacctgtgccaaaaaagcttgttttggggctgaaccagatgagggaaccgatccaggtcaaaaatagcttccctccccttttgaggcttatttctgacttggatccattccctaatccagttcagctcgtggccctgtgagcactgggctgacagcacagcttgttgatgctcaaagagaacacccatgcaacctcaarcttcattttacctgggatgcttttttcttctcctgtagctttgggctggtggatctttgtgtctggtaggtggcagcttttggaagctgtgagtgattgaagtcagtggattataatagaaatttagcacagcttttggtggagctggtacattaatgacactgtcaactgcatggggtgatggtttgtaggtggagatctggtttgtatctgtgcgattgcaaattatgctttcattttgcagcaattttgagctgcttgggtgacacatctctgtttcattttcattatcatgtgaat

SEQ ID NO: 93644 - DNA, 535 bp, Chicken  19866894412432_4
ggcagtgcagtgctgcacccaagctaataaaactctttgtctgcgtggtgctgagctgtctgcttgtctcggcgtggagctatccggtgtctcgcatggcttcccctgagctgaagccaataacctgacctggattccccagagctgcttggtggatgtgtctccctcctgtctgtgtcctgtagaacctgttcttatctggggtgttctagtcccctactgccctggataaatgagattagtgtgctgcttttggcttccagtgttgacacagatgagagttgaggaggatggctgagytgagccaggcagctctgctccttgtcccaggtgcagggcttggcttctggggtacccagccgtgctcagtcagcagttcctgctgcctggaggggatgtccgttccttgtgggtgggtttcccctgggggcagaagtgcctgtccttttggcagtgggagcagctgagcggtgtgcagcagtgcctgctcctcctggggtgggcggccgtcgtagagcccctgggagcactcaga

SEQ ID NO: 93645 - DNA, 600 bp, Chicken  19866894412437_1
ctctttaagggaaaaaaaaaggaagaggaggattgtatacacaaaccattctggcccacagtgcagagtgctgatggaagcactagcacataggtactaacttacaccagtacaagtgaagcactgggtttaatgcagtaagtggtttagaaactgtacacaggaaagctgtaccaaaacaggtaggtattcattttctcataaggcctcttctatccctatgaagtattgcaacatcaaaagtattcatggaggatatccaccaaaaccaaatctcaagtacacaaattcagattctcrtcaaagattcagatgcagtatgtagtaatttctacatctgatatgacagagtgtatgccatatttgagctcccagcttcctccagctggtcagtaaaacaactccagcttcaaagaaggcacatagcacagttcctctcctgctacagccaggtcttctgtgcctgggatggtagacctggaatgcaccagttatacaaacaaacaggcatttagtacatcccagaagaattactggatctcacagagatcccacttagcttctgtgctccttacccaacagttgctctaaaactagtca

SEQ ID NO: 93646 - DNA, 599 bp, Chicken  19866894412442_1
  misc_feature (1)..(250): n is any nucleotide
nnnnnnnnnnnnnnnnnnnnnnnnnnnnnnnnnnnnnnnnnnnnnnnnnnnnnnnnnnnnnnnnnnnnnnnnnnnnnnnnnnnnnnnnnnnnnnnnnnnnnnnnnnnnnnnnnnnnnnnnnnnnnnnnnnnnnnnnnnnnnnnnnnnnnnnnnnnnnnnnnnnnnnnnnnnnnnnnnnnnnnnnnnnnnnnnnnnnnnnnnnnnnnnnnnnnnnnnnnnnnnnnnnnnnnnnnnnnnnnnnnnnnnnnnncactttgctccctggcagcattctgaagcagcttaagtaatcagcctctsaatatatacaaaaagaagctgatggtatttcaaacagcattgcattccaccccagttccatagttttcctcatcccacagcacaatgacctaagtttcccatcttgtggaccggtttccttttgttccatacaaaacaaacacgggttgctttgcaataagccactcagtatttgtacagtaagggactatttccaaaagagcttcaattygctcattaaaataggccacatccctggtagactaaacgctaacttgagaagtctaaacagatgctgctctgggaataaatttgtggct

SEQ ID NO: 93647 - DNA, 599 bp, Chicken  19866894412442_2
  misc_feature (1)..(39): n is any nucleotide
nnnnnnnnnnnnnnnnnnnnnnnnnnnnnnnnnnnnnnncactttgctccctggcagcattctgaagcagcttaagtaatcagcctctsaatatatacaaaaagaagctgatggtatttcaaacagcattgcattccaccccagttccatagttttcctcatcccacagcacaatgacctaagtttcccatcttgtggaccggtttccttttgttccatacaaaacaaacacgggttgctttgcaataagccactcagtatttgtacagtaagggactatttccaaaagagcttcaattygctcattaaaataggccacatccctggtagactaaacgctaacttgagaagtctaaacagatgctgctctgggaataaatttgtggctgcacacggtacaaccaattgctcctgtgacattacagcggggagatgccacagctaaggagaacggcagctttgcttcagccccaaacaagttacaacagcagcaacactggctcagggaatttttaacgaattaataaccagccagggttagtagcctgaggggaagtcaaggattaagcactatgaggataaacacatacagcagcttc

SEQ ID NO: 93648 - DNA, 533 bp, Chicken  19866894412446_1
tatccgattgtcagagggagcagataatctgtgatgcttgatgtaactgctgcaaagtatttgcatatcttctctgtggggaaacaaaactgctagggagtgaataacagcgcacggatcattgcaggcagggtcactgggcccatacactcactattaacccttctcaggatctgtattgccacagaatgagttgtcatgggtttcaggcaaagggcttgctccgcattatgggcagagctggcacttgctcgcgcattgcagccctgcgtgatgaaatgcgaatgcgatcaggtcgaygggtagctgctttttggcagcggatgtcgagtcgttgcatctcrgtcttgatttatgacggataacgagctaccaaaaaacatactgggaggtactcggggaaatatggcccccatgaggagccagcagcacgctctccgggccgctgagcaatgcagctgggaacctttaagagctttctgaaattttcgctggccggcagattgccctacgtctgcctcgcagaccttcct

SEQ ID NO: 93649 - DNA, 489 bp, Chicken  19866894412446_2
aactgctgcaaagtatttgcatatcttctctgtggggaaacaaaactgctagggagtgaataacagcgcacggatcattgcaggcagggtcactgggcccatacactcactattaacccttctcaggatctgtattgccacagaatgagttgtcatgggtttcaggcaaagggcttgctccgcattatgggcagagctggcacttgctcgcgcattgcagccctgcgtgatgaaatgcgaatgcgatcaggtcgaygggtagctgctttttggcagcggatgtcgagtcgttgcatctcrgtcttgatttatgacggataacgagctaccaaaaaacatactgggaggtactcggggaaatatggcccccatgaggagccagcagcacgctctccgggccgctgagcaatgcagctgggaacctttaagagctttctgaaattttcgctggccggcagattgccctacgtctgcctcgcagaccttcct

SEQ ID NO: 93650 - DNA, 562 bp, Chicken  19866894412448_1
tgtgcatttggaagaatctgctctagtttgcttgtgttttttaccctgaagcagagcacagctggagatgggttgctggtgaagactttaataatcccacttgggaatgatactgtcatatcaccagtgatcttcacaatgcatctaggagaatgaaaatattgtttttattgcaactcattaactccctaattttaataccgcctgtaaagcaatcactatactttcacaatctgataagctgaattcataacagaaaatcaattttaaatgaggataatgtggcactgtaattaccayrtgtgacaatgtattatcactttcaagttgaaagtcagatgaagtaagtgaaaataaaagtacagctgattaagcatacagtagtcttagtggatatttttcaggctttgaaaacatggcacagctatgcttacgcacggcctacgtagcatagaaagggatgtgacagggtgaatgaggtgcttttacagctgcccaaaattacacacagtacctacacggctatgacaaagacccttctcattttcaatattctcaccga

SEQ ID NO: 93651 - DNA, 561 bp, Chicken  19866894412448_2
gtgcatttggaagaatctgctctagtttgcttgtgttttttaccctgaagcagagcacagctggagatgggttgctggtgaagactttaataatcccacttgggaatgatactgtcatatcaccagtgatcttcacaatgcatctaggagaatgaaaatattgtttttattgcaactcattaactccctaattttaataccgcctgtaaagcaatcactatactttcacaatctgataagctgaattcataacagaaaatcaattttaaatgaggataatgtggcactgtaattaccayrtgtgacaatgtattatcactttcaagttgaaagtcagatgaagtaagtgaaaataaaagtacagctgattaagcatacagtagtcttagtggatatttttcaggctttgaaaacatggcacagctatgcttacgcacggcctacgtagcatagaaagggatgtgacagggtgaatgaggtgcttttacagctgcccaaaattacacacagtacctacacggctatgacaaagacccttctcattttcaatattctcaccga

SEQ ID NO: 93652 - DNA, 600 bp, Chicken  19866894412450_1
agaagtatgttgctgctgctctgaagaagatccttaatttggaggaggatctgaaggagcatgaggcaagccatgtgatccccagtggcaacttctctccaataatcagagcctggctcacaaactgagaaataataaagcagcttagctaatgccatttttctagggcaggcctgctgtctagagcaagaggtaaccaagagaaacagtggttggtctctgcagcagtgtggagaaagcaggatgtgcctttacagatcccaagacttctctacagctctcctgtttaacccattcctsttaatttctgatgttgctcatgggtctcaggaggaatatttttgctgggcagacatgggacagcagagggatgctgtttgggaaactgcatgctctagctcagtagcagaggcaaggcagtgctcatggctttccggagaattctgagatgaaaaagctacgttttctcagatatctgaattaaaagtgttttgggttgattctgcagcagaaaagataatgtaggaaaatacttactggaataaaattgtccagccggggaaaaaaaaaaaaaaagattgaatcttgtagcacagttga

SEQ ID NO: 93653 - DNA, 599 bp, Chicken  19866894412454_1
  misc_feature (1)..(20): n is any nucleotide
nnnnnnnnnnnnnnnnnnnnatttttacccatgtaagtacatgcatatttacagaaatatatacatgtaagtgtgtgtgagttaaagcacaaaaagctatggatctgaagggactggagtatctctactggcttcagaggtccttgaatactgctaatgttaagaatatgagccaggtgttggatgagcacaaagatgctataatttccttgcgtgaatatcaatatgcaaatatttcttcagctgagaagttgctccctatgcacataaaaaaaccaacaaacgaggagtccatacacrcagtctcagcaaatccatcagaaactgaaacaaacacctgaatgaaatccaattgcttattcatccggctgtaagcatgattaagtttactacagaacctgaaactctccttgtggaaacatcaggaagcagtcacttctcatctgccactgctgcatattgcaaagtgactcatatttttctaagtatttttgtattatttatgaatttcaataagagctgcctttaggaaaatgcaatagagcattactttgcatgcagttctaagaacaactgttatctaataactttctaaggat

SEQ ID NO: 93654 - DNA, 600 bp, Chicken  19866894412466_1
gcactacaagttagaccattatcacacacatgtatcttaactacatacaaaaatgaggcacaaagtgcaatcaagactgaattctccctagctcagtgtgtctcactaatctccagacacttctcagcctctgtatatttcatgtaagaatgtgtccaggagatgcttatgttacctatcaggctttaatgcttccagttcattgtttggttctactcacagtcctcactgccccaaaatttcgtttttaaattttaaagagatttgctttatattgaaataaaacttcttaagtacaaytcagtgttctcatccactgctgggcatgtgtcatgcaagcctacaatctcaaagacctattgaaatactttgaattttaaatttccctttgatctacaggcggyttgctcttgactctacaaaaatcatttggaaaggtttcttctatttctagttttctttggtgcctgacttcgcaattgtcaggccacttcctgaaataagtcatgactgtaccaactgtaactatcatgctaaagccaactctcgattctccggcagaaagaaagctaggctcttcagcaacacactccattgatg

SEQ ID NO: 93655 - DNA, 600 bp, Chicken  19866894412466_2
actaatctccagacacttctcagcctctgtatatttcatgtaagaatgtgtccaggagatgcttatgttacctatcaggctttaatgcttccagttcattgtttggttctactcacagtcctcactgccccaaaatttcgtttttaaattttaaagagatttgctttatattgaaataaaacttcttaagtacaaytcagtgttctcatccactgctgggcatgtgtcatgcaagcctacaatctcaaagacctattgaaatactttgaattttaaatttccctttgatctacaggcggyttgctcttgactctacaaaaatcatttggaaaggtttcttctatttctagttttctttggtgcctgacttcgcaattgtcaggccacttcctgaaataagtcatgactgtaccaactgtaactatcatgctaaagccaactctcgattctccggcagaaagaaagctaggctcttcagcaacacactccattgatgccacaacaagatactgttggcaccagggctctctcttacctatcatgcaaacatcacatttcctgcaccattttccacatcctgcttacacatcaccaaatcat

SEQ ID NO: 93656 - DNA, 600 bp, Chicken  19866894412467_1
attcaccatggggaagctggaaaccagatgccaactctgtgtcagcgctcggggcagagcacccttcagtctgtgccttcacagagcgctctctgagtgtggagggatgctacgctggggaggaggagctggaagcagtgtgacaaccctggctttcagcctgccttgcgaggatcagagacaaacgcaacagcagatgctttttgattccttgtggaggaactgcagtgaattcccagggataggaagccatcagaggagctcgaagcagagagaaagccccacccctttccttctgakgcagaaagcgactcagttggggcatttattggaaccgggcaagaacagaatgcatctcagtgcttccaggaaaatagcggggaataaccgcaggcagaggraggctgaaggaaagcgttagtaattccgtggcgcccgcagccctcttgctcaggtgttcgagctgcggcagaccagcagctactgctacagctctgcttaccgcccgcagagagagctgggggcagctgcgtttatccaccccgggccgggaacgtgctcttgggatgcctttctgcacgaggtggcttaggagcaaaa

SEQ ID NO: 93657 - DNA, 573 bp, Chicken  19866894412467_2
gagggatgctacgctggggaggaggagctggaagcagtgtgacaaccctggctttcagcctgccttgcgaggatcagagacaaacgcaacagcagatgctttttgattccttgtggaggaactgcagtgaattcccagggataggaagccatcagaggagctcgaagcagagagaaagccccacccctttccttctgakgcagaaagcgactcagttggggcatttattggaaccgggcaagaacagaatgcatctcagtgcttccaggaaaatagcggggaataaccgcaggcagaggraggctgaaggaaagcgttagtaattccgtggcgcccgcagccctcttgctcaggtgttcgagctgcggcagaccagcagctactgctacagctctgcttaccgcccgcagagagagctgggggcagctgcgtttatccaccccgggccgggaacgtgctcttgggatgcctttctgcacgaggtggcttaggagcaaaacgcaggcggcaatctctgaaccgatttggtcccacccactccgcttttttttttttaactgccgaaacagaaga

SEQ ID NO: 93658 - DNA, 599 bp, Chicken  19866894412468_1
  misc_feature (1)..(73): n is any nucleotide
nnnnnnnnnnnnnnnnnnnnnnnnnnnnnnnnnnnnnnnnnnnnnnnnnnnnnnnnnnnnnnnnnnnnnnnnnaaaagtctgctgcttcttgctcttcttaaatgaaggtctggtttctgttttagtatttacaagccaggcagcacagagagctggctctaacattcatttcagccaggctggcaaatcactgactgtagctcatccacaagaaattaagactactgcagcaaatagattctctcagaatatggaaggcagtaaagatgtgggacttcagcaatatctagacaaactgyactgctgttctgttctggaatggaacttcacattcaagtagccttcagctatacatatatatatwyttttcccctagaaaattgtaacaattaaaataagccttccacgtctgaaatctgtacttgtagttttggtacttcatagatgttatttttcttcccccttgatttccttactctttcagcatatggattttcagacccaactcccacaggatttcagtggcagatttttgattaatttgggtggaggtagaatctagttcatcaaacacagctccttgttgataggtattggg

SEQ ID NO: 93659 - DNA, 599 bp, Chicken  19866894412468_2
  misc_feature (1)..(8): n is any nucleotide
nnnnnnnnaaaagtctgctgcttcttgctcttcttaaatgaaggtctggtttctgttttagtatttacaagccaggcagcacagagagctggctctaacattcatttcagccaggctggcaaatcactgactgtagctcatccacaagaaattaagactactgcagcaaatagattctctcagaatatggaaggcagtaaagatgtgggacttcagcaatatctagacaaactgyactgctgttctgttctggaatggaacttcacattcaagtagccttcagctatacatatatatatwyttttcccctagaaaattgtaacaattaaaataagccttccacgtctgaaatctgtacttgtagttttggtacttcatagatgttatttttcttcccccttgatttccttactctttcagcatatggattttcagacccaactcccacaggatttcagtggcagatttttgattaatttgggtggaggtagaatctagttcatcaaacacagctccttgttgataggtattgggcattgtgcccttttgcataaacaggccgtaaaataggtttataaagcctgtcatgattgttttta

SEQ ID NO: 93660 - DNA, 599 bp, Chicken  19866894412468_3
  misc_feature (1)..(7): n is any nucleotide
nnnnnnnaaaagtctgctgcttcttgctcttcttaaatgaaggtctggtttctgttttagtatttacaagccaggcagcacagagagctggctctaacattcatttcagccaggctggcaaatcactgactgtagctcatccacaagaaattaagactactgcagcaaatagattctctcagaatatggaaggcagtaaagatgtgggacttcagcaatatctagacaaactgyactgctgttctgttctggaatggaacttcacattcaagtagccttcagctatacatatatatatwyttttcccctagaaaattgtaacaattaaaataagccttccacgtctgaaatctgtacttgtagttttggtacttcatagatgttatttttcttcccccttgatttccttactctttcagcatatggattttcagacccaactcccacaggatttcagtggcagatttttgattaatttgggtggaggtagaatctagttcatcaaacacagctccttgttgataggtattgggcattgtgcccttttgcataaacaggccgtaaaataggtttataaagcctgtcatgattgtttttag

SEQ ID NO: 93661 - DNA, 600 bp, Chicken  19866894412468_4
agaagtagagcatagtgtaccaataatcaaagctaccagaatttgagaaagcctcctgtgtgagagaagtcagactggatgttagtatgattacattcagatatagacctacacaagtgacatattttttcctcgtgatatacgataaggaggaaactgaagtacttttagttatagaaaaaatataaatatccagataaatttcaaggaagatgtgttaaaattgtacaggaaggaatgtaaaaatatttaaatcttataaatacatcaagtgaaactttcaagtgcctttagcgctaygagccattccttttcagtgtagtatgataatacctacagtgctgtggagcctaactaacatttatagagtgctttgcatttccacagtgtcattcatcccagaaactttaaacactgatagcagcataagtcagattagttcatctaaaaagaaggatataaaggctaaagtcaatattatagtctgggatattcaatagcgttttcacaagcatagtaaaatcacttgtggtagcctaaatgagagtatagagctagaagtctttgggtcaggatatttctgtaatcccttgtccacat

SEQ ID NO: 93662 - DNA, 599 bp, Chicken  19866894412472_1
  misc_feature (1)..(122): n is any nucleotide
nnnnnnnnnnnnnnnnnnnnnnnnnnnnnnnnnnnnnnnnnnnnnnnnnnnnnnnnnnnnnnnnnnnnnnnnnnnnnnnnnnnnnnnnnnnnnnnnnnnnnnnnnnnnnnnnnnnnnnnnnntgacattaacaagtaagatttaaaacagcgtgcatgttattgggtgcttttgtgttgtatcttgtccttgctttatatctgtaaacaaaatactttctcaatctgttgattcaaaattgaactatttgaattaatcattatgcaatgattatttcaaaatcaataaactgacatacartgatttgcaatggtttttacacactgttttggtttttggtttggaggtgttttttctttaatctgttagaaatttcataaaacatgagaatatttttctaatcagttctgtatgtaaataacagactattcaaaatgttatctttattcctaggaatttgatagtgttcttaaaatttgtagaatgaaagaaagattacttacagtcccagtttgctataaactcagactctgaaaatgctacctactgtagataaactcagagaattatatcccctgggctttaagagagtatccytt

SEQ ID NO: 93663 - DNA, 600 bp, Chicken  19866894412472_2
cartgatttgcaatggtttttacacactgttttggtttttggtttggaggtgttttttctttaatctgttagaaatttcataaaacatgagaatatttttctaatcagttctgtatgtaaataacagactattcaaaatgttatctttattcctaggaatttgatagtgttcttaaaatttgtagaatgaaagaaagattacttacagtcccagtttgctataaactcagactctgaaaatgctacctactgtagataaactcagagaattatatcccctgggctttaagagagtatccyttatttttctaagggctttctctatatttacatagctactctttatgctatactatgctaaacaacatctgtttgtctgaggcatttattatgtgagtatatcctgtgttggctagaggaatcaagattcagaactctgatatcacttgtactttgttctgattgctggccacattccctrtcataaatttgtgtgttatttgccatcagtttctaaacattcattgttgtcatgacttaytctactgggttaaaaagccttttagtacctgatggttttagtaccttatgtctgaagta

SEQ ID NO: 93664 - DNA, 600 bp, Chicken  19866894412472_3
gtagaatgaaagaaagattacttacagtcccagtttgctataaactcagactctgaaaatgctacctactgtagataaactcagagaattatatcccctgggctttaagagagtatccyttatttttctaagggctttctctatatttacatagctactctttatgctatactatgctaaacaacatctgtttgtctgaggcatttattatgtgagtatatcctgtgttggctagaggaatcaagattcagaactctgatatcacttgtactttgttctgattgctggccacattccctrtcataaatttgtgtgttatttgccatcagtttctaaacattcattgttgtcatgacttaytctactgggttaaaaagccttttagtacctgatggttttagtaccttatgtctgaagtatttatacattgcagtcacaccacttcttaatgtcctatttgataacccaagtggattgaattgtagcagtctcccgcgaaaatgcatttatctacctctcaagtaatacttgtgactctcttctactttttccctagtttttcaatctctattttaaaaatatagaagacagaacttcata

SEQ ID NO: 93665 - DNA, 544 bp, Chicken  19866894412472_4
gctacctactgtagataaactcagagaattatatcccctgggctttaagagagtatccyttatttttctaagggctttctctatatttacatagctactctttatgctatactatgctaaacaacatctgtttgtctgaggcatttattatgtgagtatatcctgtgttggctagaggaatcaagattcagaactctgatatcacttgtactttgttctgattgctggccacattccctrtcataaatttgtgtgttatttgccatcagtttctaaacattcattgttgtcatgacttaytctactgggttaaaaagccttttagtacctgatggttttagtaccttatgtctgaagtatttatacattgcagtcacaccacttcttaatgtcctatttgataacccaagtggattgaattgtagcagtctcccgcgaaaatgcatttatctacctctcaagtaatacttgtgactctcttctactttttccctagtttttcaatctctattttaaaaatatagaagacagaacttcatatatt

SEQ ID NO: 93666 - DNA, 600 bp, Chicken  19866894412473_1
taacttgtgcagtctgttcttgcatcatttattactagaggcttagcataaagttctacaataaaagataatgaaatgctgtaataggacaagtcgtctttctgattgctgcaacagtaccacttgagttacagaatggccattttgtctgctcgcatagaatcatttcttcttaaaaaacggctttgttttcatgtttgaaatgagaagagttggctgcaagtagcagctatttttttctttctgatttttgtttatagtagcgctttcccaacaaattcagcctacgccatctgaatytcccaggtgctgcagctctctcctctggcccgtgggacccctcagcygcyctgttcagcccaatccctgattgtcctgccacrtccagccagttcacagctttgtgtttccttactcttcaatcagatggcattagggaccygatgagcactgtttgtgacayctgatctttaggaacctcaaaaaataggtgtttggagcttcctgatcttgaaaggccagaaattggaagagctgccaaatgatttattttggtgactggatttaatttaytgactgtttgtgttttaaacgtggcaa

SEQ ID NO: 93667 - DNA, 600 bp, Chicken  19866894412473_2
ataaagttctacaataaaagataatgaaatgctgtaataggacaagtcgtctttctgattgctgcaacagtaccacttgagttacagaatggccattttgtctgctcgcatagaatcatttcttcttaaaaaacggctttgttttcatgtttgaaatgagaagagttggctgcaagtagcagctatttttttctttctgatttttgtttatagtagcgctttcccaacaaattcagcctacgccatctgaatytcccaggtgctgcagctctctcctctggcccgtgggacccctcagcygcyctgttcagcccaatccctgattgtcctgccacrtccagccagttcacagctttgtgtttccttactcttcaatcagatggcattagggaccygatgagcactgtttgtgacayctgatctttaggaacctcaaaaaataggtgtttggagcttcctgatcttgaaaggccagaaattggaagagctgccaaatgatttattttggtgactggatttaatttaytgactgtttgtgttttaaacgtggcaacaggaggttgcacaactagtcaagttactgcatttgcaggttttagc

SEQ ID NO: 93668 - DNA, 600 bp, Chicken  19866894412473_3
aagttctacaataaaagataatgaaatgctgtaataggacaagtcgtctttctgattgctgcaacagtaccacttgagttacagaatggccattttgtctgctcgcatagaatcatttcttcttaaaaaacggctttgttttcatgtttgaaatgagaagagttggctgcaagtagcagctatttttttctttctgatttttgtttatagtagcgctttcccaacaaattcagcctacgccatctgaatytcccaggtgctgcagctctctcctctggcccgtgggacccctcagcygcyctgttcagcccaatccctgattgtcctgccacrtccagccagttcacagctttgtgtttccttactcttcaatcagatggcattagggaccygatgagcactgtttgtgacayctgatctttaggaacctcaaaaaataggtgtttggagcttcctgatcttgaaaggccagaaattggaagagctgccaaatgatttattttggtgactggatttaatttaytgactgtttgtgttttaaacgtggcaacaggaggttgcacaactagtcaagttactgcatttgcaggttttagccag

SEQ ID NO: 93669 - DNA, 600 bp, Chicken  19866894412473_4
ataggacaagtcgtctttctgattgctgcaacagtaccacttgagttacagaatggccattttgtctgctcgcatagaatcatttcttcttaaaaaacggctttgttttcatgtttgaaatgagaagagttggctgcaagtagcagctatttttttctttctgatttttgtttatagtagcgctttcccaacaaattcagcctacgccatctgaatytcccaggtgctgcagctctctcctctggcccgtgggacccctcagcygcyctgttcagcccaatccctgattgtcctgccacrtccagccagttcacagctttgtgtttccttactcttcaatcagatggcattagggaccygatgagcactgtttgtgacayctgatctttaggaacctcaaaaaataggtgtttggagcttcctgatcttgaaaggccagaaattggaagagctgccaaatgatttattttggtgactggatttaatttaytgactgtttgtgttttaaacgtggcaacaggaggttgcacaactagtcaagttactgcatttgcaggttttagccaggcacagctttctttgttcatttgcaccatgtac

SEQ ID NO: 93670 - DNA, 600 bp, Chicken  19866894412473_5
ttttgtctgctcgcatagaatcatttcttcttaaaaaacggctttgttttcatgtttgaaatgagaagagttggctgcaagtagcagctatttttttctttctgatttttgtttatagtagcgctttcccaacaaattcagcctacgccatctgaatytcccaggtgctgcagctctctcctctggcccgtgggacccctcagcygcyctgttcagcccaatccctgattgtcctgccacrtccagccagttcacagctttgtgtttccttactcttcaatcagatggcattagggaccygatgagcactgtttgtgacayctgatctttaggaacctcaaaaaataggtgtttggagcttcctgatcttgaaaggccagaaattggaagagctgccaaatgatttattttggtgactggatttaatttaytgactgtttgtgttttaaacgtggcaacaggaggttgcacaactagtcaagttactgcatttgcaggttttagccaggcacagctttctttgttcatttgcaccatgtacttcctagtgatgctgttgtagcctatcacagatgtgatggcagatccacattgtttctg

SEQ ID NO: 93671 - DNA, 600 bp, Chicken  19866894412473_6
catttcttcttaaaaaacggctttgttttcatgtttgaaatgagaagagttggctgcaagtagcagctatttttttctttctgatttttgtttatagtagcgctttcccaacaaattcagcctacgccatctgaatytcccaggtgctgcagctctctcctctggcccgtgggacccctcagcygcyctgttcagcccaatccctgattgtcctgccacrtccagccagttcacagctttgtgtttccttactcttcaatcagatggcattagggaccygatgagcactgtttgtgacayctgatctttaggaacctcaaaaaataggtgtttggagcttcctgatcttgaaaggccagaaattggaagagctgccaaatgatttattttggtgactggatttaatttaytgactgtttgtgttttaaacgtggcaacaggaggttgcacaactagtcaagttactgcatttgcaggttttagccaggcacagctttctttgttcatttgcaccatgtacttcctagtgatgctgttgtagcctatcacagatgtgatggcagatccacattgtttctgactaaggtttctttactgatt

SEQ ID NO: 93672 - DNA, 600 bp, Chicken  19866894412473_7
acaaattcagcctacgccatctgaatytcccaggtgctgcagctctctcctctggcccgtgggacccctcagcygcyctgttcagcccaatccctgattgtcctgccacrtccagccagttcacagctttgtgtttccttactcttcaatcagatggcattagggaccygatgagcactgtttgtgacayctgatctttaggaacctcaaaaaataggtgtttggagcttcctgatcttgaaaggccagaaattggaagagctgccaaatgatttattttggtgactggatttaatttaytgactgtttgtgttttaaacgtggcaacaggaggttgcacaactagtcaagttactgcatttgcaggttttagccaggcacagctttctttgttcatttgcaccatgtacttcctagtgatgctgttgtagcctatcacagatgtgatggcagatccacattgtttctgactaaggtttctttactgattcccagtttctttacctcattcccagttggaaagctttgctgtcattgcagacatgatttaatagtgtgatgtgatgtcttgtaggccttgggcagcgcaacgtttaggga

SEQ ID NO: 93673 - DNA, 599 bp, Chicken  19866894412475_1
  misc_feature (1)..(83): n is any nucleotide
nnnnnnnnnnnnnnnnnnnnnnnnnnnnnnnnnnnnnnnnnnnnnnnnnnnnnnnnnnnnnnnnnnnnnnnnnnnnnnnnnnnataacttcatcgaccttaacagcagcctgacatagactggaagattgattgcagtcgttttgttacacttggacacagaccagatttgttcattaaatcccaaagctgcttcttgtgctacaacttctcctttccagcagagggtgaaagcaagggtgagtggtctcacggtgtacctgtgatcctacaaagtgagtcctctctttgagttgttccrtatggaactgaggcatgagaaaaggtagagaaggaattgttcgccattatgttgtgagggctcttaagtgttgagataaaaggtcgcttttcctgtgtgaattttatacatagyctgtgtcccttacagtggctaagtgtctttaacattctttaaaagagaatttgaaaatgagtatgcactatgcgtggtcactgcagcatgagtataacagtaggttatgaaaatcccataaaatgctgtctgttgtttgtagttgcacgtgaatatgacagtagagacacctgagtagcactgtg

SEQ ID NO: 93674 - DNA, 600 bp, Chicken  19866894412475_2
atagactggaagattgattgcagtcgttttgttacacttggacacagaccagatttgttcattaaatcccaaagctgcttcttgtgctacaacttctcctttccagcagagggtgaaagcaagggtgagtggtctcacggtgtacctgtgatcctacaaagtgagtcctctctttgagttgttccrtatggaactgaggcatgagaaaaggtagagaaggaattgttcgccattatgttgtgagggctcttaagtgttgagataaaaggtcgcttttcctgtgtgaattttatacatagyctgtgtcccttacagtggctaagtgtctttaacattctttaaaagagaatttgaaaatgagtatgcactatgcgtggtcactgcagcatgagtataacagtaggttatgaaaatcccataaaatgctgtctgttgtttgtagttgcacgtgaatatgacagtagagacacctgagtagcactgtgtctctgtggtgctagctttgaggggtctgcagagtccttcaggttatatcttggtggaggattgtgtcctgcaacagcctttgtcagagattggcctgcagctagttttgctgcc

SEQ ID NO: 93675 - DNA, 600 bp, Chicken  19866894412476_1
ccttttttaaaatggaaataattgtagtcattagctggggaaatcttgttgtttgcttctgcttccgtggtttttaattgtgtgtctatgaggtggtttgagcttaagaaagacttggtgaaataactgcttggtataatagtttggatattatttggatattatatttggatattatagagtagcataaacatcacagctataacagaattaagggctttgctacagccacacttgtaagttttatcttgaatgtgtacttaattcaaccattgtcttaggaatgcttgtttgtagctsgttccaggtgctgatgtcatatcagcttgttatatcagaaacaaatttgggacatcacttttctgtagtattggaaccagttggccccttcctgttcattagctggtatgctgaaagtcttgaagcaagtggttggacttcatcataatcagatggatgcgtaggatgacagtcttcaaacaaacatagttcttatcctctgaaaatattttcagcattcccagggctacttttttttgtttgttttaaaaaagatatatatattttttaatctccaaattaaagcacttatttcttagt

SEQ ID NO: 93676 - DNA, 600 bp, Chicken  19866894412483_1
actacagcaggtccaagaacggcagcctcaccatgccagggcacaacttggtacaatgcagagtacagagaaaacctattcatttttatagacctgtccaaacatggcattttagaagagtccaagtagaaacaagccaaatgaaagcattttccagcttctggttctgcttagttccagtgggaacagggcactgtcacactaaaatatttgataaaatgggaaggaaaatgatagaagaatgaaaagtattatcaaggcagtattaatactaaacaaagtatgaatgatctctttatygttttcagtaattcacagtatatgcagtctcctatctactactctcctatgactcttctaaatgtttaccctttctaatctgcagtaagtaactgctaaagaacgactggccttgtagacttccattttggcgaagggggttggcacagaatgactctcattctttaaacctgtgcaaaacwtgacagcagtaataacacaagcctgtcattggaaaaaagaaaaggaagccaaagattcttgaagttcctcctctctaaaaaaaaaccctggctcaaacctcaagtgaaaaaakacaaa

SEQ ID NO: 93677 - DNA, 600 bp, Chicken  19866894412483_2
ggaacagggcactgtcacactaaaatatttgataaaatgggaaggaaaatgatagaagaatgaaaagtattatcaaggcagtattaatactaaacaaagtatgaatgatctctttatygttttcagtaattcacagtatatgcagtctcctatctactactctcctatgactcttctaaatgtttaccctttctaatctgcagtaagtaactgctaaagaacgactggccttgtagacttccattttggcgaagggggttggcacagaatgactctcattctttaaacctgtgcaaaacwtgacagcagtaataacacaagcctgtcattggaaaaaagaaaaggaagccaaagattcttgaagttcctcctctctaaaaaaaaaccctggctcaaacctcaagtgaaaaaakacaaagttcttactcagcatttgtaagaggacaaatgcataggtttcctgagtccacaggatgtacagtagtaagctgtctgactgtgcagcttcactgacaattgagccaaagaacaagtatcttagaaatgtgttttcaatatattatattccgctcaattctgtcactaatttatggggttggg

SEQ ID NO: 93678 - DNA, 600 bp, Chicken  19866894412483_3
atctctttatygttttcagtaattcacagtatatgcagtctcctatctactactctcctatgactcttctaaatgtttaccctttctaatctgcagtaagtaactgctaaagaacgactggccttgtagacttccattttggcgaagggggttggcacagaatgactctcattctttaaacctgtgcaaaacwtgacagcagtaataacacaagcctgtcattggaaaaaagaaaaggaagccaaagattcttgaagttcctcctctctaaaaaaaaaccctggctcaaacctcaagtgwaaaaakacaaagttcttactcagcatttgtaagaggacaaatgcataggtttcctgagtccacaggatgtacagtagtaagctgtctgactgtgcagcttcactgacaattgagccaaagaacaagtatcttagaaatgtgttttcaatatattatattccgctcaattctgtcactaatttatggggttgggaatgctttttcacattatcgcaggtcaaaagccatctagtttgaagaatcaaactcaaaatccactgtgtatgtgcaaagcaagcacaaagaatgcaaactggattg

SEQ ID NO: 93679 - DNA, 600 bp, Chicken  19866894412483_4
ttatygttttcagtaattcacagtatatgcagtctcctatctactactctcctatgactcttctaaatgtttaccctttctaatctgcagtaagtaactgctaaagaacgactggccttgtagacttccattttggcgaagggggttggcacagaatgactctcattctttaaacctgtgcaaaacwtgacagcagtaataacacaagcctgtcattggaaaaaagaaaaggaagccaaagattcttgaagttcctcctctctaaaaaaaaaccctggctcaaacctcaagtgaaaaaakacaaagttcttactcagcatttgtaagaggacaaatgcataggtttcctgagtccacaggatgtacagtagtaagctgtctgactgtgcagcttcactgacaattgagccaaagaacaagtatcttagaaatgtgttttcaatatattatattccgctcaattctgtcactaatttatggggttgggaatgctttttcacattatcgcaggtcaaaagccatctagtttgaagaatcaaactcaaaatccactgtgtatgtgcaaagcaagcacaaagaatgcaaactggattgacacat

SEQ ID NO: 93680 - DNA, 599 bp, Chicken  19866894412491_1
  misc_feature (1)..(205): n is any nucleotide
nnnnnnnnnnnnnnnnnnnnnnnnnnnnnnnnnnnnnnnnnnnnnnnnnnnnnnnnnnnnnnnnnnnnnnnnnnnnnnnnnnnnnnnnnnnnnnnnnnnnnnnnnnnnnnnnnnnnnnnnnnnnnnnnnnnnnnnnnnnnnnnnnnnnnnnnnnnnnnnnnnnnnnnnnnnnnnnnnnnnnnnnnnnnnnnnnnnnnnnnnnnnnaaccaaaagaggttctcttcctcctctgtccccatggccacgctacccccagtactgacatcagttcttctctggcccaagtgtaagctagttawggcaggwaaaatagcagaaaactactactcctttttgttctggagatctgcttttctgctggctctgttgcctaaactggctcactctggggtcaggtaaggttcaagagcaccaagaaagggaaacctgggaccatgcttgttggcatcagcttgcaattaggttggctcagccacaccataaatcacagtctgactctgtgacctatgggaatggtgaagacgtgctccaatagcgaggaattctgctgaggagcagtttttcctgctctgaggctaaggcattaacacaggttctc

SEQ ID NO: 93681 - DNA, 599 bp, Chicken  19866894412491_2
  misc_feature (1)..(198): n is any nucleotide
nnnnnnnnnnnnnnnnnnnnnnnnnnnnnnnnnnnnnnnnnnnnnnnnnnnnnnnnnnnnnnnnnnnnnnnnnnnnnnnnnnnnnnnnnnnnnnnnnnnnnnnnnnnnnnnnnnnnnnnnnnnnnnnnnnnnnnnnnnnnnnnnnnnnnnnnnnnnnnnnnnnnnnnnnnnnnnnnnnnnnnnnnnnnnnnnnnnnnnaaccaaaagaggttctcttcctcctctgtccccatggccacgctacccccagtactgacatcagttcttctctggcccaagtgtaagctagttawggcaggwaaaatagcagaaaactactactcctttttgttctggagatctgcttttctgctggctctgttgcctaaactggctcactctggggtcaggtaaggttcaagagcaccaagaaagggaaacctgggaccatgcttgttggcatcagcttgcaattaggttggctcagccacaccataaatcacagtctgactctgtgacctatgggaatggtgaagacgtgctccaatagcgaggaattctgctgaggagcagtttttcctgctctgaggctaaggcattaacacaggttctcctcaggc

SEQ ID NO: 93682 - DNA, 600 bp, Chicken  19866894412491_3
ctctgtgacctatgggaatggtgaagacgtgctccaatagcgaggaattctgctgaggagcagtttttcctgctctgaggctaaggcattaacacaggttctcctcaggcacaaagctcacagcaagaggcaattgttcctcaagcactaaaggagcttattctgctttctccttcattttcaatactggaacacaaagaactctgggaaactgtacatcaaacccctgcacagggcaggtgccagtcgctgttcattgcttgctcattaagtatgaaagcaataatgagaagtttcacrtgcttcagaagcgtatgattgtcaaagcaacaactcaagagacgtaagagctgataaagcatctgttcagactgaaatgactacattttgacaatcaaaaaccagatgatcacgctttctcctgacaagcactgtcacagccctgaactgtagatcccgctgacatgggctgtctcaacatcatgactctgacttcacagaagggacaactcacaccaaacaaaagcctgctgctcacgggaacagcttctttctgcacactgaagagcagtcagtagcttcctaccctgtgaaaaagat

SEQ ID NO: 93683 - DNA, 600 bp, Chicken  19866894412492_1
tggtatacaagggttgctccaaaattattgcctcctgattaattatgttgggttacgtcatcagagacagatgttggtggtatggcagtagaggttgaaccttcccagcagcattgcattatgtgaaagacaagccagttccagatggctatgcagattttcataagcacagcatacaggctcttgtttttagctggcaaaaacgtatagttaatggtggtacctacattgaaaaatagtgttttgtaactgggaattgattctatcaaacagtgctatagtgctctttgcacctattayagttttcagggagctaaataggaggcactactttcagggtaacctatgcacatgatcatatgggtgcagatgcgacatagagctataataaatacgggatgttcccacctgaaaactttcccactctgtaatacagtagcctgtaggctctggcagccactctacagctgcttgtttattcatctttctgaagaagcagccttatgaatgcaagcactgaagattattttccttaaataacagcttaaatatatttgtagccttccatttcctcacagttcattcatcccagctctaggt

SEQ ID NO: 93684 - DNA, 600 bp, Chicken  19866894412493_1
gtgacctttctgttctcggggaataggctcgcagcagctgtgctgcacacaccgaggaacatttgtatttctcattaacacctgaaattacaaaagcttgaactatgttatttgttcaggctgctttgcttgactgtggaaacactattatttgttttcaggatttagtatgtgaaaataaaatattatttccattaaaaaggcatttcagtcttgcttggaacctaatcagaaactaatccagaaacactttggcctgcatgcgtaatacacttgatacagttcataagcaataataayrtgccttgcttgctcttgtttgattttttttcctacagtaagatgcctgccactctcaggccaatttgggagtcgatgcagtaaaaagattcacaatcctaagagcaaaataagcccactagaaaaggaaactgtccataaagtctcaataaatattcagtgaattcatttcatgcctaaatgaatataacaaaaaataaaatgcctacagggatatctgtaaaagctgcttcttaaatgccagcttcacaataaatcaagtctgcagtaaaataaaataacaatcatgcacttcaaact

SEQ ID NO: 93685 - DNA, 600 bp, Chicken  19866894412493_2
tgacctttctgttctcggggaataggctcgcagcagctgtgctgcacacaccgaggaacatttgtatttctcattaacacctgaaattacaaaagcttgaactatgttatttgttcaggctgctttgcttgactgtggaaacactattatttgttttcaggatttagtatgtgaaaataaaatattatttccattaaaaaggcatttcagtcttgcttggaacctaatcagaaactaatccagaaacactttggcctgcatgcgtaatacacttgatacagttcataagcaataataayrtgccttgcttgctcttgtttgattttttttcctacagtaagatgcctgccactctcaggccaatttgggagtcgatgcagtaaaaagattcacaatcctaagagcaaaataagcccactagaaaaggaaactgtccataaagtctcaataaatattcagtgaattcatttcatgcctaaatgaatataacaaaaaataaaatgcctacagggatatctgtaaaagctgcttcttaaatgccagcttcacaataaatcaagtctgcagtaaaataaaataacaatcatgcacttcaaacta

SEQ ID NO: 93686 - DNA, 600 bp, Chicken  19866894412496_1
agtatggacctgtgctgctggagaggaacatcacaacctcaactaacagcagaaggaagggaaggagaatagaaaatgtgtgtgttcttgctgagtttggtaacacactgtgcttttactatggatttatgtccataccaagtatcttcaggaaaggtgctttgagcagagaactggaatccacagccctgggtggggaaaaaagcccactgcaggggaagaggtgaaacaggacaactgagatctgccagccacgtgcctgccatatgtcccagtgtgctggcatagcatctagtgaawaattctgttgaagtggagaaaaaaaaaagttacacaattcctcgaggtatcctctgtgggttgctgagcagtttctccagctactcctattagacattccctttccaaatcagaaaagatgcctgaaggttgagtaggcttcatagctgcattgctacctttccatttgctcttcggcaagctcccctacctgcagagtttgcacagggcaaggtactgtaggagctaacccatagaaacccatttccagtagtcacgccaaagatgtcagcacagacaggatgtcttgagaaggaaggt

SEQ ID NO: 93687 - DNA, 600 bp, Chicken  19866894412498_1
tattttctgctgggtaaatcacttcatttctgcattacagacagttcttttggagctgaaaaatagcacgttactggcacaggaacatttgcaatcccaaaatcctttcttttccctccccttgctattctctcccctgtccaaccatgttgaaaaacgagatgggagtagaaacagctggaactcctcctctctgttttttccagcattcccgcatcattcaagaccatttcacgcacacctcaaagaattgtgtagtgcaccacctacagaaatacagattatgcagaccgtggaaamaggcaggtgctcatttcatcatcctgatgaacatttcagagattaaacattaagaatgactgcagcccatcagctcttgggaaaaaacaaacacctcaaaaatcacatcattgcaagtggactttatacaagagaggctttagcatgggaagtgggtaatggcagtaggacacatgctcagaggtaggcaaagaggaggatttcatccccagggcataagactccagaagcataatgtgtccagatctatatatagatatagatatatacactattaaaaaaaaatagaaacctctaaat

SEQ ID NO: 93688 - DNA, 600 bp, Chicken  19866894412501_1
ataggagaaaagaaggatcattcctggttgtgcacagcagcaatgattttactgtgtttttttgtttgttttaataggtttggggtttttttgctgtttacatgtcaaatttaatatcatttaaaatatgagagaagggaataaataatgtagagggtaaaaatatattcagtggtataagaagtataaagaacgtttaacataataactgctaagaaataccaaagatgaagcactgagaattttctcttatggagaaaactaataattttaattaagtatctcaatttttctaactayggttctccactttaatataaagaaagagcctagaagagtaactcagagcaatttcctaggtttcacttttttaatttggtattgttcaatagatttttgaaatactgtttcagaaaatatttcctttacatgcaatcattttcatttaagaaagatgtattactcaacagtttgatatttctgaccacagacaggaaccagtacattaagtatatattaaaaaaaaaagaaaatttcagtttcctgtggctggaagctgtagaacttcatgaggaaaaaaaaaaaattgcagtgctgaga

SEQ ID NO: 93689 - DNA, 558 bp, Chicken  19866894412501_2
taccaaagatgaagcactgagaattttctcttatggagaaaactaataattttaattaagtatctcaatttttctaactayggttctccactttaatataaagaaagagcctagaagagtaactcagagcaatttcctaggtttcacttttttaatttggtattgttcaatagatttttgaaatactgtttcagaaaatatttcctttacatgcaatcattttcatttaagaaagatgtattactcaacagtttgatatttctgaccacagacaggaaccagtacattaagtatatattyaaaaaaaaagaaaatttcagtttcctgtggctggaagctgtagaacttcatgaggaaaaaaaaaaaattgcagtgctgagatcactgccaaaactaattggttctacattcctctttgctgagatgtgaagaatcaatatacttctaggtcagatctctttttgcaaaaggagaagtggaaaagaagtgagaaaaggaaatgacagaaggcaggaatttaccagtgagtatatgaaaactaaggtttctttatttttt

SEQ ID NO: 93690 - DNA, 557 bp, Chicken  19866894412501_3
accaaagatgaagcactgagaattttctcttatggagaaaactaataattttaattaagtatctcaatttttctaactayggttctccactttaatataaagaaagagcctagaagagtaactcagagcaatttcctaggtttcacttttttaatttggtattgttcaatagatttttgaaatactgtttcagaaaatatttcctttacatgcaatcattttcatttaagaaagatgtattactcaacagtttgatatttctgaccacagacaggaaccagtacattaagtatatattayaaaaaaaagaaaatttcagtttcctgtggctggaagctgtagaacttcatgaggaaaaaaaaaaaattgcagtgctgagatcactgccaaaactaattggttctacattcctctttgctgagatgtgaagaatcaatatacttctaggtcagatctctttttgcaaaaggagaagtggaaaagaagtgagaaaaggaaatgacagaaggcaggaatttaccagtgagtatatgaaaactaaggtttctttatttttt

SEQ ID NO: 93691 - DNA, 556 bp, Chicken  19866894412501_4
ccaaagatgaagcactgagaattttctcttatggagaaaactaataattttaattaagtatctcaatttttctaactayggttctccactttaatataaagaaagagcctagaagagtaactcagagcaatttcctaggtttcacttttttaatttggtattgttcaatagatttttgaaatactgtttcagaaaatatttcctttacatgcaatcattttcatttaagaaagatgtattactcaacagtttgatatttctgaccacagacaggaaccagtacattaagtatatattaayaaaaaaagaaaatttcagtttcctgtggctggaagctgtagaacttcatgaggaaaaaaaaaaaattgcagtgctgagatcactgccaaaactaattggttctacattcctctttgctgagatgtgaagaatcaatatacttctaggtcagatctctttttgcaaaaggagaagtggaaaagaagtgagaaaaggaaatgacagaaggcaggaatttaccagtgagtatatgaaaactaaggtttctttatttttt

SEQ ID NO: 93692 - DNA, 555 bp, Chicken  19866894412501_5
caaagatgaagcactgagaattttctcttatggagaaaactaataattttaattaagtatctcaatttttctaactayggttctccactttaatataaagaaagagcctagaagagtaactcagagcaatttcctaggtttcacttttttaatttggtattgttcaatagatttttgaaatactgtttcagaaaatatttcctttacatgcaatcattttcatttaagaaagatgtattactcaacagtttgatatttctgaccacagacaggaaccagtacattaagtatatattaaayaaaaaagaaaatttcagtttcctgtggctggaagctgtagaacttcatgaggaaaaaaaaaaaattgcagtgctgagatcactgccaaaactaattggttctacattcctctttgctgagatgtgaagaatcaatatacttctaggtcagatctctttttgcaaaaggagaagtggaaaagaagtgagaaaaggaaatgacagaaggcaggaatttaccagtgagtatatgaaaactaaggtttctttatttttt

SEQ ID NO: 93693 - DNA, 502 bp, Chicken  19866894412501_6
taagtatctcaatttttctaactayggttctccactttaatataaagaaagagcctagaagagtaactcagagcaatttcctaggtttcacttttttaatttggtattgttcaatagatttttgaaatactgtttcagaaaatatttcctttacatgcaatcattttcatttaagaaagatgtattactcaacagtttgatatttctgaccacagacaggaaccagtacattaagtatatattaaaaaaaaaagaaaatttcagtttcctgtggctggaagctgtagaacttcatgaggyaaaaaaaaaaattgcagtgctgagatcactgccaaaactaattggttctacattcctctttgctgagatgtgaagaatcaatatacttctaggtcagatctctttttgcaaaaggagaagtggaaaagaagtgagaaaaggaaatgacagaaggcaggaatttaccagtgagtatatgaaaactaaggtttctttatttttt

SEQ ID NO: 93694 - DNA, 600 bp, Chicken  19866894412517_1
cattttatagttttctaagtgaaaaaagctaagtaatagatacaaaaaagctagctaataaaatccatacttaataaataagtgtcctatacttgcctctatatacgttttaaagtataatcaatgatttagtatcacttgtgcccatgttcagaagtacattaagtgtgtccctggagcaagcagccatactggctcgaagtcatggacttttgcccaagtgtatcatgcaagctacagacatcatgcgaaaacaagtaagtatttggacctgtgtgtctactgcaagccactaccttyattccagtaacattccagtaatagtaaaaacacctatttatttcagcatggcattgtattttgttcactatgaactcatatagycratctgttactagtgcctgaacggctacgcatctttgacacaacaaattaacttttgcatgtacagccatttacagcaattatatgcctcagtatgcattatttaaagtatgtgccttgatggttagaaagtagagactagctaggatacttaagacaatttctgcatgaacaaaaatcaaaagtctcaatcagtgttaaattgtagaaactccc

SEQ ID NO: 93695 - DNA, 600 bp, Chicken  19866894412517_2
tcctatacttgcctctatatacgttttaaagtataatcaatgatttagtatcacttgtgcccatgttcagaagtacattaagtgtgtccctggagcaagcagccatactggctcgaagtcatggacttttgcccaagtgtatcatgcaagctacagacatcatgcgaaaacaagtaagtatttggacctgtgtgtctactgcaagccactaccttyattccagtaacattccagtaatagtaaaaacacctatttatttcagcatggcattgtattttgttcactatgaactcatatagycratctgttactagtgcctgaacggctacgcatctttgacacaacaaattaacttttgcatgtacagccatttacagcaattatatgcctcagtatgcattatttaaagtatgtgccttgatggttagaaagtagagactagctaggatacttaagacaatttctgcatgaacaaaaatcaaaagtctcaatcagtgttaaattgtagaaactccctagtggtagacaacagtgcttgcaaagtgctttgggattaatttgatcttttcagtaaacacagatgactcatgtatctaccaa

SEQ ID NO: 93696 - DNA, 600 bp, Chicken  19866894412517_3
ctatacttgcctctatatacgttttaaagtataatcaatgatttagtatcacttgtgcccatgttcagaagtacattaagtgtgtccctggagcaagcagccatactggctcgaagtcatggacttttgcccaagtgtatcatgcaagctacagacatcatgcgaaaacaagtaagtatttggacctgtgtgtctactgcaagccactaccttyattccagtaacattccagtaatagtaaaaacacctatttatttcagcatggcattgtattttgttcactatgaactcatatagycratctgttactagtgcctgaacggctacgcatctttgacacaacaaattaacttttgcatgtacagccatttacagcaattatatgcctcagtatgcattatttaaagtatgtgccttgatggttagaaagtagagactagctaggatacttaagacaatttctgcatgaacaaaaatcaaaagtctcaatcagtgttaaattgtagaaactccctagtggtagacaacagtgcttgcaaagtgctttgggattaatttgatcttttcagtaaacacagatgactcatgtatctaccaaca

SEQ ID NO: 93697 - DNA, 599 bp, Chicken  19866894412524_1
  misc_feature (1)..(188): n is any nucleotide
nnnnnnnnnnnnnnnnnnnnnnnnnnnnnnnnnnnnnnnnnnnnnnnnnnnnnnnnnnnnnnnnnnnnnnnnnnnnnnnnnnnnnnnnnnnnnnnnnnnnnnnnnnnnnnnnnnnnnnnnnnnnnnnnnnnnnnnnnnnnnnnnnnnnnnnnnnnnnnnnnnnnnnnnnnnnnnnnnnnnnnnnnnnnactaaatggcaaaacaacaccagagatcccagtaagagatcaaaagattaaaatgcagaaacatttattgttagtttctgctgaatctatattaataatttgacccaggttygtgtaactgtgtataaaagtagcatcttgaagctgtacatcacaaagaggaaaaataccaaaggcacagcacaggagatgttattacttatctgtactcaaaaagttctttttcctcctgtttctgtaactctctccatcaggtctgggacacaggtgtaggctttattatagttaaggacaaaaagaacaaatcaaaggaacagtgaagggaagtgtcctgttaaaagaactatattttataaggtaggtccccttccatgaaaaaagataggaacattatatggcttcacatacaaa

SEQ ID NO: 93698 - DNA, 600 bp, Chicken  19866894412531_1
cttaccggcaaagaacactggtatttcctaatcccttctaaggctttttctctgtgtgtaagattatggatacttttcctgaatataataatatgttttcatgggtccccagaggctgacacctgaatcttctcatctttttaggataaagaattatttcttaaaattatggggcattattagcacatttaaactggttcagaaagagattagaaagttataccctcccaggggagagtcaacatttctcagaacaaagcctacttccaaagaaatccaagagtttgtgtgggctcggcrtatttgtaggtcaccccagaatgggcttaagttgccgacatttttgctggcaatcacagctaaatgaaactccttctatagaaacttacttcactttacatttactttgggcaaagaacagtgaagaacctgctgttttccaaagctcagcggcgctgctatcaaaggtagacaaactgctgctgttattccagacttcagctaaactctggatgtcatactggcgatgcatggaaatctccagcmttttcctcactgagtacaagtttcttgcttattaaatacattggctcctagaag

SEQ ID NO: 93699 - DNA, 600 bp, Chicken  19866894412531_2
tctcagaacaaagcctacttccaaagaaatccaagagtttgtgtgggctcggcrtatttgtaggtcaccccagaatgggcttaagttgccgacatttttgctggcaatcacagctaaatgaaactccttctatagaaacttacttcactttacatttactttgggcaaagaacagtgaagaacctgctgttttccaaagctcagcggcgctgctatcaaaggtagacaaactgctgctgttattccagacttcagctaaactctggatgtcatactggcgatgcatggaaatctccagcmttttcctcactgagtacaagtttcttgcttattaaatacattggctcctagaagttttcaataagaatggttttctgatcaaagcggtaaagcattcttcagcagcacattgaaatgactcaataaggcagaatggcttcaatttgatttttataattttaactttagactgtaactcttccataagtttacttcagtgtgttcaaaatggttttattttttggcatattttgggctgggggaaatcttaatctttatttaaacttgtagagttgttaaaatatccaacgaaaagacagt

SEQ ID NO: 93700 - DNA, 599 bp, Chicken  19866894412535_1
  misc_feature (1)..(199): n is any nucleotide
nnnnnnnnnnnnnnnnnnnnnnnnnnnnnnnnnnnnnnnnnnnnnnnnnnnnnnnnnnnnnnnnnnnnnnnnnnnnnnnnnnnnnnnnnnnnnnnnnnnnnnnnnnnnnnnnnnnnnnnnnnnnnnnnnnnnnnnnnnnnnnnnnnnnnnnnnnnnnnnnnnnnnnnnnnnnnnnnnnnnnnnnnnnnnnnnnnnnnnnttccatgtaagaaaattttagaaggccaatggtcaacggccatcatctgaaacgtgcattcctttagttaagtatgggtttctttggttcaggtcagtgtyacagttcaaacatacctgctatgttattcatttgaatatatctccaggtcctgcagaccaacccttaacaggacatttattcccataaacccattcatcagatctgcaacacagcaggtaggcagatttcttctggctgaagcaatctggaygtggtcccctacctcttctctggagcatggttgcaartgaggcatcttccttccccatggaaaactggtgatgctgagagccttcatagcaatgcaaggcactgatcacaatgacagcttaaatgcacttctgatgatgaaaggaat

SEQ ID NO: 93701 - DNA, 599 bp, Chicken  19866894412535_2
  misc_feature (1)..(47): n is any nucleotide
nnnnnnnnnnnnnnnnnnnnnnnnnnnnnnnnnnnnnnnnnnnnnnnttccatgtaagaaaattttagaaggccaatggtcaacggccatcatctgaaacgtgcattcctttagttaagtatgggtttctttggttcaggtcagtgtyacagttcaaacatacctgctatgttattcatttgaatatatctccaggtcctgcagaccaacccttaacaggacatttattcccataaacccattcatcagatctgcaacacagcaggtaggcagatttcttctggctgaagcaatctggaygtggtcccctacctcttctctggagcatggttgcaartgaggcatcttccttccccatggaaaactggtgatgctgagagccttcatagcaatgcaaggcactgatcacaatgacagcttaaatgcacttctgatgatgaaaggaatttttttcttttttcttcttacatacattaattgtatggttttttttatctgcttcatgccagtaagtcattctgcactgattttctatagttcccattgcaaggtagctgattgttctgcctcactggtggacagttaagtgattaaatgct

SEQ ID NO: 93702 - DNA, 599 bp, Chicken  19866894412535_3
  misc_feature (1)..(10): n is any nucleotide
nnnnnnnnnnttccatgtaagaaaattttagaaggccaatggtcaacggccatcatctgaaacgtgcattcctttagttaagtatgggtttctttggttcaggtcagtgtyacagttcaaacatacctgctatgttattcatttgaatatatctccaggtcctgcagaccaacccttaacaggacatttattcccataaacccattcatcagatctgcaacacagcaggtaggcagatttcttctggctgaagcaatctggaygtggtcccctacctcttctctggagcatggttgcaartgaggcatcttccttccccatggaaaactggtgatgctgagagccttcatagcaatgcaaggcactgatcacaatgacagcttaaatgcacttctgatgatgaaaggaatttttttcttttttcttcttacatacattaattgtatggttttttttatctgcttcatgccagtaagtcattctgcactgattttctatagttcccattgcaaggtagctgattgttctgcctcactggtggacagttaagtgattaaatgctcagttatatgttttctaaatgttatcactcctacagg

SEQ ID NO: 93703 - DNA, 600 bp, Chicken  19866894412538_1
ggcatcttcaagagaggcaatagtctatgcaactaggagtgctttacagagttatttgctttcaaagcatttacttattgcctgtgctgatttttctccacatttaccttgacacaaattctgtttcctggtctcctccacacctaagatgaaatcctaatgagtgcagataaattatttcagttttgtttcagtatgaggacactgtatgaacctgtgctcaagaggttttgttggaaataattaaagaccagttatattgtcatggttcaaaatcccttgtaattgttcagatcttgytgctgtttttggtgtcaaggacagctactgatgggaaatcacatatagtttataaatgtgcatcacataattcaaatactcattgcctttactagaaaygcatcaaatyctcctcacacttaaatgtcagctgaattcatagaatagaatcacagactcaccaaggttgaaaaagacctccaagatcatccagtccaaccatccacctaccaycaatatttccacactcagmcatgtcccttagtacatctaatgttagctgggatggtgcccaagcaaggagaagtgtagtcaggacat

SEQ ID NO: 93704 - DNA, 508 bp, Chicken  19866894412538_2
acatttaccttgacacaaattctgtttcctggtctcctccacacctaagatgaaatcctaatgagtgcagataaattatttcagttttgtttcagtatgaggacactgtatgaacctgtgctcaagaggttttgttggaaataattaaagaccagttatattgtcatggttcaaaatcccttgtaattgttcagatcttgytgctgtttttggtgtcaaggacagctactgatgggaaatcacatatagtttataaatgtgcatcacataattcaaatactcattgcctttactagaaaygcatcaaatyctcctcacacttaaatgtcagctgaattcatagaatagaatcacagactcaccaaggttgaaaaagacctccaagatcatccagtccaaccatccacctaccaycaatatttccacactcagmcatgtcccttagtacatctaatgttagctgggatggtgcccaagcaaggagaagtgtagtcaggacatatgcgtg

SEQ ID NO: 93705 - DNA, 498 bp, Chicken  19866894412538_3
tgacacaaattctgtttcctggtctcctccacacctaagatgaaatcctaatgagtgcagataaattatttcagttttgtttcagtatgaggacactgtatgaacctgtgctcaagaggttttgttggaaataattaaagaccagttatattgtcatggttcaaaatcccttgtaattgttcagatcttgytgctgtttttggtgtcaaggacagctactgatgggaaatcacatatagtttataaatgtgcatcacataattcaaatactcattgcctttactagaaaygcatcaaatyctcctcacacttaaatgtcagctgaattcatagaatagaatcacagactcaccaaggttgaaaaagacctccaagatcatccagtccaaccatccacctaccaycaatatttccacactcagmcatgtcccttagtacatctaatgttagctgggatggtgcccaagcaaggagaagtgtagtcaggacatatgcgtg

SEQ ID NO: 93706 - DNA, 394 bp, Chicken  19866894412538_4
cctgtgctcaagaggttttgttggaaataattaaagaccagttatattgtcatggttcaaaatcccttgtaattgttcagatcttgytgctgtttttggtgtcaaggacagctactgatgggaaatcacatatagtttataaatgtgcatcacataattcaaatactcattgcctttactagaaaygcatcaaatyctcctcacacttaaatgtcagctgaattcatagaatagaatcacagactcaccaaggttgaaaaagacctccaagatcatccagtccaaccatccacctaccaycaatatttccacactcagmcatgtcccttagtacatctaatgttagctgggatggtgcccaagcaaggagaagtgtagtcaggacatatgcgtg

SEQ ID NO: 93707 - DNA, 375 bp, Chicken  19866894412538_5
gttggaaataattaaagaccagttatattgtcatggttcaaaatcccttgtaattgttcagatcttgytgctgtttttggtgtcaaggacagctactgatgggaaatcacatatagtttataaatgtgcatcacataattcaaatactcattgcctttactagaaaygcatcaaatyctcctcacacttaaatgtcagctgaattcatagaatagaatcacagactcaccaaggttgaaaaagacctccaagatcatccagtccaaccatccacctaccaycaatatttccacactcagmcatgtcccttagtacatctaatgttagctgggatggtgcccaagcaaggagaagtgtagtcaggacatatgcgtg

SEQ ID NO: 93708 - DNA, 599 bp, Chicken  19866894412544_1
  misc_feature (1)..(114): n is any nucleotide
nnnnnnnnnnnnnnnnnnnnnnnnnnnnnnnnnnnnnnnnnnnnnnnnnnnnnnnnnnnnnnnnnnnnnnnnnnnnnnnnnnnnnnnnnnnnnnnnnnnnnnnnnnnnnnnnnngttggagtttatacaatgtatactgattgaacttaagggtcatttaaaaggtaagacactaggaattattcatatctaaattgcacctgtgtacaggcaaacacaattccactggaagatgctgatactgtctcatagcaaaggagacagacatggttgtgtacgttggccatcaggccctgaccrggagggctgtgctggaaaatctcagctttaacttctgtgcacttctgccctatgtactgatggcctaaaaataacttctctgtctttgytgaaacagtcacacatctacatgtgaaagtcactataaaatgttaagtatgttgttactgccgatcacagacagtgttgactttgaaagctgagcctattcacttttcatcattcagaaaggtgatattgagagagaagtaaaatagggattaactgtggataacatgaaagccatgaagaggctccaagggaggtactactctttcccc

SEQ ID NO: 93709 - DNA, 599 bp, Chicken  19866894412544_2
  misc_feature (1)..(25): n is any nucleotide
nnnnnnnnnnnnnnnnnnnnnnnnngttggagtttatacaatgtatactgattgaacttaagggtcatttaaaaggtaagacactaggaattattcatatctaaattgcacctgtgtacaggcaaacacaattccactggaagatgctgatactgtctcatagcaaaggagacagacatggttgtgtacgttggccatcaggccctgaccrggagggctgtgctggaaaatctcagctttaacttctgtgcacttctgccctatgtactgatggcctaaaaataacttctctgtctttgytgaaacagtcacacatctacatgtgaaagtcactataaaatgttaagtatgttgttactgccgatcacagacagtgttgactttgaaagctgagcctattcacttttcatcattcagaaaggtgatattgagagagaagtaaaatagggattaactgtggataacatgaaagccatgaagaggctccaagggaggtactactctttcccctcagttacagacaaaggtgaatgacaggagcagcaagatcagcaggaagccatattttaatgctggagaaagaagataaagactcttcc

SEQ ID NO: 93710 - DNA, 600 bp, Chicken  19866894412544_3
ctataaaatgttaagtatgttgttactgccgatcacagacagtgttgactttgaaagctgagcctattcacttttcatcattcagaaaggtgatattgagagagaagtaaaatagggattaactgtggataacatgaaagccatgaagaggctccaagggaggtactactctttcccctcagttacagacaaaggtgaatgacaggagcagcaagatcagcaggaagccatattttaatgctggagaaagaagataaagactcttccttagaagaaaaacaacaacaacaatgaaccacwaccctctggccagcaggacraataaaacagcaggtctttaaaaatttggaaatcccaatcagaaaacaaaaatgaaaaaatcaaacttgtcgttttcttccaatatttagtcatccgttgttctgaacgtggcagctcagaacttacgtgtcagcagactatctctccacatgtggttaaaagcagaggttggctccaagttgtgatatgacagacgtgtaatattgtgtaatattgcacaggggctattttgtctttctaaaagctgtgcagcatagcgctgaactagttttgttagtc

SEQ ID NO: 93711 - DNA, 600 bp, Chicken  19866894412544_4
tgttactgccgatcacagacagtgttgactttgaaagctgagcctattcacttttcatcattcagaaaggtgatattgagagagaagtaaaatagggattaactgtggataacatgaaagccatgaagaggctccaagggaggtactactctttcccctcagttacagacaaaggtgaatgacaggagcagcaagatcagcaggaagccatattttaatgctggagaaagaagataaagactcttccttagaagaaaaacaacaacaacaatgaaccacwaccctctggccagcaggacraataaaacagcaggtctttaaaaatttggaaatcccaatcagaaaacaaaaatgaaaaaatcaaacttgtcgttttcttccaatatttagtcatccgttgttctgaacgtggcagctcagaacttacgtgtcagcagactatctctccacatgtggttaaaagcagaggttggctccaagttgtgatatgacagacgtgtaatattgtgtaatattgcacaggggctattttgtctttctaaaagctgtgcagcatagcgctgaactagttttgttagtccctctgatggatacaaagtg

SEQ ID NO: 93712 - DNA, 600 bp, Chicken  19866894412551_1
ttttgttttctttaatcgtaactagctctattccccaatttcttattttgtaacaggagcataaaagataataataattagctcttctagaatatgggcctaggagcactgaataattcctgcaggctgcttcctctccttaacagatgtttttgagtaatattttaattagagtcacatattctgatgagtaattatgttgccaatgttgtttctttatcttaagtttctactcataatgatttgcaatgtagattttatatagttcttcacaatgctgactttgaattgagcagcacrtgtccacacccgatagcaagttgctccacgtgagatatgttggctgttccaagcagcagccagccccttgggcagcagataccaagtggtgtaaagtaggtacgttcctttgccttgtgcatatctggaacagcagctgtggaaagtcagcaaccctgaggttcctttgtactgtgacaccaaatttgctgaaagaccctgtatgctggagaaaatgactgcaagtgagaatggcttaggacatcaggtcagggttggtcagtgctattcatcagaaaccttgctaaaggcagcttaagc

SEQ ID NO: 93713 - DNA, 599 bp, Chicken  19866894412552_1
  misc_feature (1)..(49): n is any nucleotide
nnnnnnnnnnnnnnnnnnnnnnnnnnnnnnnnnnnnnnnnnnnnnnnnnacatagtcaggggttaatcatttggttagccatgcagttaatacctttaaataactgaagggattttatttcctttaataagctactaatgcattatttaataagtcataatttgaatataataaaatgcctagattcattcaatgataattgtgttacttaaaaacattctgaaggtatgcaaacaaaatgataacagtggcatttcctttcagtctgaagctgtatggcagatagctgattccttgagytttgtgtacagtactatatyttgcttgatatttatcattatctacatttcaaaataaccaaatctcaactggaacagaactcaaagcacttcgataaaaggatttttatatgtgctcatgatttctaattaggaagagaaaaaaatgctgaaaacaaagataatgtgttactagcaatactcattgtctttaattacatccagagtgttccaacacataaaaaacatgactagaaaataacagcccaatgtgttcactggacaggacagcgatgcactcataactcttaggaaaattct

SEQ ID NO: 93714 - DNA, 599 bp, Chicken  19866894412552_2
  misc_feature (1)..(29): n is any nucleotide
nnnnnnnnnnnnnnnnnnnnnnnnnnnnnacatagtcaggggttaatcatttggttagccatgcagttaatacctttaaataactgaagggattttatttcctttaataagctactaatgcattatttaataagtcataatttgaatataataaaatgcctagattcattcaatgataattgtgttacttaaaaacattctgaaggtatgcaaacaaaatgataacagtggcatttcctttcagtctgaagctgtatggcagatagctgattccttgagytttgtgtacagtactatatyttgcttgatatttatcattatctacatttcaaaataaccaaatctcaactggaacagaactcaaagcacttcgataaaaggatttttatatgtgctcatgatttctaattaggaagagaaaaaaatgctgaaaacaaagataatgtgttactagcaatactcattgtctttaattacatccagagtgttccaacacataaaaaacatgactagaaaataacagcccaatgtgttcactggacaggacagcgatgcactcataactcttaggaaaattctccttgtcaaaacagttgaag

SEQ ID NO: 93715 - DNA, 522 bp, Chicken  19866894412556_1
gtgtgtatatggaaatccccactgcctctttgcaacagcacttcccaattgttttctaagtttctcctacacccaaaagcagcagcccgcatcctcctgcttgctggccgttcccagccctcggatcacagggatctgtgctttacgcaccgcgttctacacctggacccactgtaacacagtactggtttgcttcggcgctgggagtgggagagaacagcacataaggttaactctccgtccccgaagcaagttgggagcgctcgaatcccaccgcgcgcatctacagacagagaagawtgccctgagcgctcgcccgcctatttaaaccggccagctccgcaaaaggcagccggattgagccatgagaaccaaacgggacaagcagcagagccgcgaccgagctcgggacgtctcccagcgccgagagccgttcccrctgggggccgggctgcacgcagccgttcgcaccaacggcagagggccgccccgacccccgcgatgccgcgctcggaaggggcg

SEQ ID NO: 93716 - DNA, 383 bp, Chicken  19866894412556_2
gctttacgcaccgcgttctacacctggacccactgtaacacagtactggtttgcttcggcgctgggagtgggagagaacagcacataaggttaactctccgtccccgaagcaagttgggagcgctcgaatcccaccgcgcgcatctacagacagagaagawtgccctgagcgctcgcccgcctatttaaaccggccagctccgcaaaaggcagccggattgagccatgagaaccaaacgggacaagcagcagagccgcgaccgagctcgggacgtctcccagcgccgagagccgttcccrctgggggccgggctgcacgcagccgttcgcaccaacggcagagggccgccccgacccccgcgatgccgcgctcggaaggggcg

SEQ ID NO: 93717 - DNA, 599 bp, Chicken  19866894412561_1
  misc_feature (1)..(85): n is any nucleotide
nnnnnnnnnnnnnnnnnnnnnnnnnnnnnnnnnnnnnnnnnnnnnnnnnnnnnnnnnnnnnnnnnnnnnnnnnnnnnnnnnnnnntctgtgcccatccctcctgatgggggcttctgggagacccattttcagctgtgtgggtgtttcctgaatgctgggggctgcctatggctgagctatcggggggatatctaatctttaccaggcttaattattttactgattctttattttaagtggtttgtctttcaggtgtgtggatgtttccttgcttccatccctgactgttagctgccacrctgggaaagcagtggggtgtgaatgttggggtttttggatggtgtttctgcattcaaccagacctgagatggggcagcagttttgctcgtcagtggagctttgagcagaggagggttggtttgtttccccactgtagctccctaccaaagcccatcagagggagatacccccagacctggaagagaccttcagaggagctctgagctcttattccagttcttgtttgcctccacctgtttttcctttcctgttccatcggttactgatgtggatggatggcgctcacctcacagtgccg

SEQ ID NO: 93718 - DNA, 600 bp, Chicken  19866894412563_1
gaatatccttgagtctcttgttaatactttatccacttctatgaaaagaacagcacagtttcacacttggcccacaggatccagtgtgagtaaagagtactcatcagctcctatcattgtacccagtaattatctttgcaataattaacgtatgtctcttggagatctctatcaggattcttctttctgttgtggactgtaactattaggttggatctctggctggtatgaactggcgtagcacccttaattaatatcttttcctctccctcggagctgggaggaagccttaggaaaagrcgttgttaagggatattcaaggcagctgtgaactgaagatgtgaatttcttaaaatctgattatgcattccttgtgcacgcagaactctgaaagttttagcacagtcgtaaatccaagatcagactctcaatttgtctgtatgtaggaatatgtgctgcactgaatgcaggtatcattaaactgataaactttgtattgatataagcatttttctttgaagactgtacagatgactttcagactttaaaacctcacagccagtatctaagatgcaaaagtgcttggtctgccatccttct

SEQ ID NO: 93719 - DNA, 599 bp, Chicken  19866894412565_1
  misc_feature (1)..(1): n is any nucleotide
ntgaagttcctaattggagaaaggaaatttgtaataacgatagtctagaagactcacaaaggagaagctgcctgttggttgaggctggtaaatcaaaatccgctccaaatctcatttgtactagtaattataggtaatggttccgatgagagcataatccctaacagaaatatgcaatgcctgtttctcaataacactgtgtaactacagagctacctatcctgcttctcatacagcaaaatgtagattttaaattgtacatgcatcttgcctttcaaaatgcatctgccttatccaccyggctacagtaactacaaccactgccttatgtactgtggtttattctayccccaaggaccagaccaaagactgtcaagactttcactaacaaacagctgtgcattttgggtgacagttgtcacgtcttctttgggggtgatccatgagaagaacagttcacaattacagcttcttgatgatttagttatggtatggtgttatggtattatacaaattgtgcttaccacccatgcagcaatccatacatggtctgtgtagagaaaataaacagctataccttctgaacatggaacaaagct

SEQ ID NO: 93720 - DNA, 600 bp, Chicken  19866894412565_2
aagactcacaaaggagaagctgcctgttggttgaggctggtaaatcaaaatccgctccaaatctcatttgtactagtaattataggtaatggttccgatgagagcataatccctaacagaaatatgcaatgcctgtttctcaataacactgtgtaactacagagctacctatcctgcttctcatacagcaaaatgtagattttaaattgtacatgcatcttgcctttcaaaatgcatctgccttatccaccyggctacagtaactacaaccactgccttatgtactgtggtttattctayccccaaggaccagaccaaagactgtcaagactttcactaacaaacagctgtgcattttgggtgacagttgtcacgtcttctttgggggtgatccatgagaagaacagttcacaattacagcttcttgatgatttagttatggtatggtgttatggtattatacaaattgtgcttaccacccatgcagcaatccatacatggtctgtgtagagaaaataaacagctataccttctgaacatggaacaaagctgtttcagtgacaagtcagtggaaacttgataggtgggaccaggggacca

SEQ ID NO: 93721 - DNA, 600 bp, Chicken  19866894412565_3
ctgtgcattttgggtgacagttgtcacgtcttctttgggggtgatccatgagaagaacagttcacaattacagcttcttgatgatttagttatggtatggtgttatggtattatacaaattgtgcttaccacccatgcagcaatccatacatggtctgtgtagagaaaataaacagctataccttctgaacatggaacaaagctgtttcagtgacaagtcagtggaaacttgataggtgggaccaggggaccacttctgcgtgcttgtgatagagcacagctagataccagccctccttygtggctctggcgaaatacagtgtttgmtggtctgttagtgtcagccaatttttgcccatctgatcaggaaagtcagctactgttttggtggagttaatttaagtttgaggtgatataacagattcttaattccatcatcatgtcatttatgcataaatgttgattatgctttctgaattccccttcccaccatattaggataaatggttatgagtggttaagacatataaccagttatccttgactttacttatttggtctttatccagcaaatacttaagcactaatcacacttcctag

SEQ ID NO: 93722 - DNA, 600 bp, Chicken  19866894412565_4
gtcttctttgggggtgatccatgagaagaacagttcacaattacagcttcttgatgatttagttatggtatggtgttatggtattatacaaattgtgcttaccacccatgcagcaatccatacatggtctgtgtagagaaaataaacagctataccttctgaacatggaacaaagctgtttcagtgacaagtcagtggaaacttgataggtgggaccaggggaccacttctgcgtgcttgtgatagagcacagctagataccagccctccttygtggctctggcgaaatacagtgtttgmtggtctgttagtgtcagccaatttttgcccatctgatcaggaaagtcagctactgttttggtggagttaatttaagtttgaggtgatataacagattcttaattccatcatcatgtcatttatgcataaatgttgattatgctttctgaattccccttcccaccatattaggataaatggttatgagtggttaagacatataaccagttatccttgactttacttatttggtctttatccagcaaatacttaagcactaatcacacttcctagatctcatgaacaatcagaaaacacaca

SEQ ID NO: 93723 - DNA, 600 bp, Chicken  19866894412570_1
gtctctaacgtgactgaagaacaagtactgattctgtgagctgctcaccgccatcagtaacaatgaacccaagtcagctgctatgattgatttagtgaaaaaagggtttctcacggataaaataagaacaacatccaaataaatacagccaaattctatctggtattttaaaaactaacctgattcttgtgtttttcctcgtatggaacagtccctctttggagctttaactgtattagcaccacttggctttgaagtcttctgcttgttttgaactgaaaccgaccttccttttgattyacctccttcctccttttccctatcacataaaaggtccttgtttttctgagagtcatccatttctattctggttttcttggagtcctctttcaatttgaatctagatgcaactttctgcccttcattctgaaggtcatctagttttgtcaccgcttcacatgcttggtccaccccttgttttttcattttaccctcttcccgaggaagtggttttrcagaatccccttcttccttaggcttagcttttctcttcttttttttcctttctgcacgtacctcgctaccatcttctgaaagttc

SEQ ID NO: 93724 - DNA, 596 bp, Chicken  19866894412570_2
tctttggagctttaactgtattagcaccacttggctttgaagtcttctgcttgttttgaactgaaaccgaccttccttttgattyacctccttcctccttttccctatcacataaaaggtccttgtttttctgagagtcatccatttctattctggttttcttggagtcctctttcaatttgaatctagatgcaactttctgcccttcattctgaaggtcatctagttttgtcaccgcttcacatgcttggtccaccccttgttttttcattttaccctcttcccgaggaagtggttttrcagaatccccttcttccttaggcttagcttttctcttcttttttttcctttctgcacgtacctcgctaccatcttctgaaagttcagagtcagactctgacaaggcatagaatttcctgaggttctctacagaggtatagttaacaggtcgacctcttttatccaccgtgcacttcagcttgaaccttttgtcatgaaacattgctcgaaagcgtttgtcaatcttgactttccggtctttttctggcatctcccaaaaccggggatcccgggcaacacggctgaaccgcccatcg

SEQ ID NO: 93725 - DNA, 600 bp, Chicken  19866894412575_1
ctgtgtctgaaggaaaatcctgtggtatgatgccagggattctgtgaattattaggtttgcagtatgtaaacaatgtatttgaacttagtttatgtgcatatgtctcagtcttggaagaagacatgactcctactggcttcagtgaacattagaaacttacagagctaatgtggatgtggttcgtaagtattttgttcaaagaataatgaagtactggattaacccttccaaaatcagaattcctggaaaagcacttcttcaggatcctttagtatttttacacgtaggaatttacttcrgtgtagtaactctttgcatcactccagaagagttttcagtgtaaacaagtgcagacaagtccttacttgcatgccatacatgcacgtgcaaggttcagtcctatgctgtatttgatcgtgtgtgtatgcaaatgctctgcttgtccaaaaagttctgtcaacaagraacaaattcatatattacacacaaaaaagttgggtaatggaatgtgcaattgtataatggaaacaaaaatgtgtttgtttgatatatagattggatgagattcctgtattctactgttggaaacatgtttgaat

SEQ ID NO: 93726 - DNA, 600 bp, Chicken  19866894412575_2
taatgtggatgtggttcgtaagtattttgttcaaagaataatgaagtactggattaacccttccaaaatcagaattcctggaaaagcacttcttcaggatcctttagtatttttacacgtaggaatttacttcrgtgtagtaactctttgcatcactccagaagagttttcagtgtaaacaagtgcagacaagtccttacttgcatgccatacatgcacgtgcaaggttcagtcctatgctgtatttgatcgtgtgtgtatgcaaatgctctgcttgtccaaaaagttctgtcaacaagraacaaattcatatattacacacaaaaaagttgggtaatggaatgtgcaattgtataatggaaacaaaaatgtgtttgtttgatatatagattggatgagattcctgtattctactgttggaaacatgtttgaatgaaaacaactagggtttgattttaagaataggcaagtagccttttcatgaagcctatgaaatcagcagatagtgacttatgattctcttgacattaaagatgaatcttgcatgtatggaaacagattttggcaaatacaacattttggttttgcataccttccttt

SEQ ID NO: 93727 - DNA, 600 bp, Chicken  19866894412586_1
aaggcagtaaaccaggctttagcagccagcttcagcaattggagggataaaatagtccgaagatgctgagttctgcaaaacaattccttcatctgttttccaccacatctttccaagcagatgttgaaaatttgagagaaggaattcaagctccagtgctattctctttatgtgttaggagttacaatgggggaaaaaagaaacaaatgtggtatggttaaatggtttgagcagagcagaaggcttgaccttttttaaagcagaatagtaaaaaaattaacattaaaaaagatcaaaatstttgcagttaaaaaagagcatgatgtcagtgtttgtatctccatccttccttgacttacagggttaaaaaaaaccaaacaaaacacaaaagaatgagtggaaaaacatgttttcaataaatataattaaaaaaaaaaaaagggaagcaaaagcaattctttcactaaaaagaaaaatctttcctttgtaaatatttaaataaatatacgtagaccagtacatctgttagggaatgagccataggatgctggagaggcaatgtcccttccacagcagtggacccggggaattcatgccaca

SEQ ID NO: 93728 - DNA, 600 bp, Chicken  19866894412590_1
ttgcgtgactgaagtcctcaggacagaaatacaggtcctacagagaaagagatgcattagaatcttgccaaatgcaacttgaaaacacaagcgtgtaatcattttagggtattttaaacacttctgttggtctgcgccgttcttgtaccgtacttgagtttggtgtcaatctaataaaactgaatgttagtaaaaaccatacaaagacattttaatcacttcctccatcacctttccctcccttctgcttttttattaggcaagatggagtgatacgatactcttaatctaatgaggatrgagctgcaaggtgcaaagtgactgggtctgaaagctgaagccttttcatcaggctgtgggccacttgatrtgaatcagctgatgaactcggctggcctgtctttggccatatgttatgctacagctggcttttaagcttccttcttcaaaataatgcttggctgttaattatgtgaaggtaagcacagcacggagccatytgggcattgcttgcttagcctacccwagatcattcctgtgctttttcttcatactaawgaacaaaacctactgtttggcattgctatggttatgctcctg

SEQ ID NO: 93729 - DNA, 600 bp, Chicken  19866894412590_2
aatgcaacttgaaaacacaagcgtgtaatcattttagggtattttaaacacttctgttggtctgcgccgttcttgtaccgtacttgagtttggtgtcaatctaataaaactgaatgttagtaaaaaccatacaaagacattttaatcacttcctccatcacctttccctcccttctgcttttttattaggcaagatggagtgatacgatactcttaatctaatgaggatrgagctgcaaggtgcaaagtgactgggtctgaaagctgaagccttttcatcaggctgtgggccacttgatrtgaatcagctgatgaactcggctggcctgtctttggccatatgttatgctacagctggcttttaagcttccttcttcaaaataatgcttggctgttaattatgtgaaggtaagcacagcacggagccatytgggcattgcttgcttagcctacccwagatcattcctgtgctttttcttcatactaawgaacaaaacctactgtttggcattgctatggttatgctcctgttaagctgggctttgtaggagggtattgcataggctggattggcctttggaagttttccagtgttgattt

SEQ ID NO: 93730 - DNA, 472 bp, Chicken  19866894412590_3
acaaagacattttaatcacttcctccatcacctttccctcccttctgcttttttattaggcaagatggagtgatacgatactcttaatctaatgaggatrgagctgcaaggtgcaaagtgactgggtctgaaagctgaagccttttcatcaggctgtgggccacttgatrtgaatcagctgatgaactcggctggcctgtctttggccatatgttatgctacagctggcttttaagcttccttcttcaaaataatgcttggctgttaattatgtgaaggtaagcacagcacggagccatytgggcattgcttgcttagcctacccwagatcattcctgtgctttttcttcatactaawgaacaaaacctactgtttggcattgctatggttatgctcctgttaagctgggctttgtaggagggtattgcataggctggattggcctttggaagttttccagtgttgattttg

SEQ ID NO: 93731 - DNA, 446 bp, Chicken  19866894412590_4
atcacctttccctcccttctgcttttttattaggcaagatggagtgatacgatactcttaatctaatgaggatrgagctgcaaggtgcaaagtgactgggtctgaaagctgaagccttttcatcaggctgtgggccacttgatrtgaatcagctgatgaactcggctggcctgtctttggccatatgttatgctacagctggcttttaagcttccttcttcaaaataatgcttggctgttaattatgtgaaggtaagcacagcacggagccatytgggcattgcttgcttagcctacccwagatcattcctgtgctttttcttcatactaawgaacaaaacctactgtttggcattgctatggttatgctcctgttaagctgggctttgtaggagggtattgcataggctggattggcctttggaagttttccagtgttgattttg

SEQ ID NO: 93732 - DNA, 414 bp, Chicken  19866894412590_5
ggcaagatggagtgatacgatactcttaatctaatgaggatrgagctgcaaggtgcaaagtgactgggtctgaaagctgaagccttttcatcaggctgtgggccacttgatrtgaatcagctgatgaactcggctggcctgtctttggccatatgttatgctacagctggcttttaagcttccttcttcaaaataatgcttggctgttaattatgtgaaggtaagcacagcacggagccatytgggcattgcttgcttagcctacccwagatcattcctgtgctttttcttcatactaawgaacaaaacctactgtttggcattgctatggttatgctcctgttaagctgggctttgtaggagggtattgcataggctggattggcctttggaagttttccagtgttgattttg

SEQ ID NO: 93733 - DNA, 600 bp, Chicken  19866894412593_1
agccatctcagctaagagtagaatggttagaactgagaatgactaagtatcagttaattttagtctgttcttggtgtttattgtgtgtatatatacctgtatttttatacacctgaagtaacaatgtgactattgttttgtgctaagccatttaatatgaagtgttttcttgttttttgtatttttttaatactgattttttcacgtctaattcaacaacctggagcccacgcttcttagattcaagacattatgcttggcatctaaaacttgcctgccttgtccttatcaaacaggggyatgtatttgatgcataatctagccagacagcaaagcatgatgatttattgacataatttttatttgttcataccatcatatttcctgttttcttaaaaatgaagagagctagcagatattcagtctcatcttgtatcggacagaagtgaccaaagggggttagaagccactgttaattgatgtacttgattgcttgtttgcctgctgtaacttctcttcatgcatgttggttgattgctttaagtagatttcataaggaactagaagaggttcatgaaggtggaacgtggcttacttaat

SEQ ID NO: 93734 - DNA, 503 bp, Chicken  19866894412593_2
ttcagtctcatcttgtatcggacagaagtgaccaaagggggttagaagccactgttaattgatgtacttgattgcttgtttgcctgctgtaacttctcttcatgcatgttggttgattgctttaagtagatttcataaggaactagaagaggttcatgaaggtggaacgtggcttacttaattggactcatttgcatagtgctgagaaggaacctaaatgggtaggttctttcccaggagttgaacgtagggaagtttccaagcaataaggaagttatttgaggctttattattcagctkaattgaattttcatacaaaatgtycctaatcttaaaggcttgtaaattgtatttgcagcaagcactggctctaaagatactgctgagagtctcataattgcatattctgccaggactgtggattttctcatagaaagcacgatgtacccctcttccttcttgtgtgcttataaattacccaatgcaatgtcaaaagtggtgca

SEQ ID NO: 93735 - DNA, 479 bp, Chicken  19866894412593_3
gaagtgaccaaagggggttagaagccactgttaattgatgtacttgattgcttgtttgcctgctgtaacttctcttcatgcatgttggttgattgctttaagtagatttcataaggaactagaagaggttcatgaaggtggaacgtggcttacttaattggactcatttgcatagtgctgagaaggaacctaaatgggtaggttctttcccaggagttgaacgtagggaagtttccaagcaataaggaagttatttgaggctttattattcagctkaattgaattttcatacaaaatgtycctaatcttaaaggcttgtaaattgtatttgcagcaagcactggctctaaagatactgctgagagtctcataattgcatattctgccaggactgtggattttctcatagaaagcacgatgtacccctcttccttcttgtgtgcttataaattacccaatgcaatgtcaaaagtggtgca

SEQ ID NO: 93736 - DNA, 600 bp, Chicken  19866894412598_1
ttcagctcatttctgatgatttctactgtcctgtcaccaaatatgaaaggcatttttggggctgcgctaagagtgagcctctgaagaaggggaaggcagagggataggctcctgaataggtgtgagaagcaaaagcccttaggacacccatgaggtcagccctggggacagtagaagaaaaccattgggcagttggggaaaatggttgtgttgggctgaaatgaaggaagaggtggaaggcaaatatgcagggctgcttttagacacaaagaggtggcacatctcgctctgcccttttasacacaggattctccctcccacatcttcatgaagttgcagctgtattggtgacactcattctttgggatttggtggttgttgaagcttcagcaaatttatctaagtcatgttgtgaatagatcaggattctttttaaaatctaaggcaagacttacccttagcagactttcctgatgtgctgggaactgttaggagtctgaacataatctgttaaaatattacaaaggtattgccaagagttgagaaatctgagacaataaaatataaaccttataaaaagccttcagccatcaaaagttt

SEQ ID NO: 93737 - DNA, 600 bp, Chicken  19866894412603_1
gtggtgaacatatgaattattgacttctccttttttttactttttttctacttggctgctatgcacttaaggaaattaacactgagctgccctaaacaagtcttcccttgtggatggtctttacatccatgggtttgtggtcttctccatcccagatgatcatttgattatcacctagtgtcagaaagatgtgtgagcttttcactgtcaagccattgctgaaaggagagggtctgtggcagatccggagagctaaacaagtgaaggccctgcaaactggaaaagacatatcctagcagkgcacacagagaagctctaactttccaactggatagaggaaaggagtcttcactggggagaacaagaagcagaatttgccatgttattttttagcagtgaccacaaatgagtgaactcyrcttgtatacactatgagggaacctacagtaaagaggttctgasataccaaaaccaggatctgcaacagggtgtctgtcagaagataaggatgctcttattaaagtcaggacaagcccagctggcggcttattgcacgtcacagttgatatcaagagccttacatgctcagcccttctgaca

SEQ ID NO: 93738 - DNA, 600 bp, Chicken  19866894412603_2
ctttacatccatgggtttgtggtcttctccatcccagatgatcatttgattatcacctagtgtcagaaagatgtgtgagcttttcactgtcaagccattgctgaaaggagagggtctgtggcagatccggagagctaaacaagtgaaggccctgcaaactggaaaagacatatcctagcagkgcacacagagaagctctaactttccaactggatagaggaaaggagtcttcactggggagaacaagaagcagaatttgccatgttattttttagcagtgaccacaaatgagtgaactcyrcttgtatacactatgagggaacctacagtaaagaggttctgasataccaaaaccaggatctgcaacagggtgtctgtcagaagataaggatgctcttattaaagtcaggacaagcccagctggcggcttattgcacgtcacagttgatatcaagagccttacatgctcagcccttctgacaaggcactaggtctcaagcaaaagctttgttctgtttctataaaaataaggggcaatttgggttcaaaaggagacagacaatgaagatacctgcagtctttatgctaaatcttgtccag

SEQ ID NO: 93739 - DNA, 600 bp, Chicken  19866894412603_3
tttacatccatgggtttgtggtcttctccatcccagatgatcatttgattatcacctagtgtcagaaagatgtgtgagcttttcactgtcaagccattgctgaaaggagagggtctgtggcagatccggagagctaaacaagtgaaggccctgcaaactggaaaagacatatcctagcagkgcacacagagaagctctaactttccaactggatagaggaaaggagtcttcactggggagaacaagaagcagaatttgccatgttattttttagcagtgaccacaaatgagtgaactcyrcttgtatacactatgagggaacctacagtaaagaggttctgasataccaaaaccaggatctgcaacagggtgtctgtcagaagataaggatgctcttattaaagtcaggacaagcccagctggcggcttattgcacgtcacagttgatatcaagagccttacatgctcagcccttctgacaaggcactaggtctcaagcaaaagctttgttctgtttctataaaaataaggggcaatttgggttcaaaaggagacagacaatgaagatacctgcagtctttatgctaaatcttgtccaga

SEQ ID NO: 93740 - DNA, 600 bp, Chicken  19866894412603_4
tttgattatcacctagtgtcagaaagatgtgtgagcttttcactgtcaagccattgctgaaaggagagggtctgtggcagatccggagagctaaacaagtgaaggccctgcaaactggaaaagacatatcctagcagkgcacacagagaagctctaactttccaactggatagaggaaaggagtcttcactggggagaacaagaagcagaatttgccatgttattttttagcagtgaccacaaatgagtgaactcyrcttgtatacactatgagggaacctacagtaaagaggttctgasataccaaaaccaggatctgcaacagggtgtctgtcagaagataaggatgctcttattaaagtcaggacaagcccagctggcggcttattgcacgtcacagttgatatcaagagccttacatgctcagcccttctgacaaggcactaggtctcaagcaaaagctttgttctgtttctataaaaataaggggcaatttgggttcaaaaggagacagacaatgaagatacctgcagtctttatgctaaatcttgtccagactgtggggaaactggtgtaggcaaagtatttctgcaaaatcat

SEQ ID NO: 93741 - DNA, 600 bp, Chicken  19866894412607_1
aatgattcagcgctaggtacagatgacagactaatttaagatattgaagttattaattaataatgacttacgctaattatgagcttgaataatttcccaagtcccaggacataaaccagcacactgctcaaaatacacagcaaactgccatttccatgcaaggcagcactggtgcctgtgttagtacatagtactctcgaagtgactgtaaatggctgaatcttatcatttcatacgcagaactactttttactgagtgtgtacactcccattacaaacaaatagagatagcacatacamctagytttgtcctctcgccatcacgtcccgcacatatggcagcaacctgccaactgcatcctcctcccagggarccttccccaccagagccactggccacagagcccctttgcaactcacccaccaaaggcactggagaggtcttcctgtgcagtracacacatgtaaggcatgggccatttgaaacagtgtggatgcatcacaataatacaggcagcagtcatgcaccacagaagtcttttttctcatgcccattcacagaccaggagaatttgctaatcacagttccataggacaagc

SEQ ID NO: 93742 - DNA, 600 bp, Chicken  19866894412607_2
ttcagcgctaggtacagatgacagactaatttaagatattgaagttattaattaataatgacttacgctaattatgagcttgaataatttcccaagtcccaggacataaaccagcacactgctcaaaatacacagcaaactgccatttccatgcaaggcagcactggtgcctgtgttagtacatagtactctcgaagtgactgtaaatggctgaatcttatcatttcatacgcagaactactttttactgagtgtgtacactcccattacaaacaaatagagatagcacatacamctagytttgtcctctcgccatcacgtcccgcacatatggcagcaacctgccaactgcatcctcctcccagggarccttccccaccagagccactggccacagagcccctttgcaactcacccaccaaaggcactggagaggtcttcctgtgcagtracacacatgtaaggcatgggccatttgaaacagtgtggatgcatcacaataatacaggcagcagtcatgcaccacagaagtcttttttctcatgcccattcacagaccaggagaatttgctaatcacagttccataggacaagcatttt

SEQ ID NO: 93743 - DNA, 598 bp, Chicken  19866894412607_3
aattatgagcttgaataatttcccaagtcccaggacataaaccagcacactgctcaaaatacacagcaaactgccatttccatgcaaggcagcactggtgcctgtgttagtacatagtactctcgaagtgactgtaaatggctgaatcttatcatttcatacgcagaactactttttactgagtgtgtacactcccattacaaacaaatagagatagcacatacamctagytttgtcctctcgccatcacgtcccgcacatatggcagcaacctgccaactgcatcctcctcccagggarccttccccaccagagccactggccacagagcccctttgcaactcacccaccaaaggcactggagaggtcttcctgtgcagtracacacatgtaaggcatgggccatttgaaacagtgtggatgcatcacaataatacaggcagcagtcatgcaccacagaagtcttttttctcatgcccattcacagaccaggagaatttgctaatcacagttccataggacaagcattttctcagtgagcagatgttcacacagtgctttgtaacagagatgataaacggtgatactggaaggtttt

SEQ ID NO: 93744 - DNA, 516 bp, Chicken  19866894412607_4
tgcaaggcagcactggtgcctgtgttagtacatagtactctcgaagtgactgtaaatggctgaatcttatcatttcatacgcagaactactttttactgagtgtgtacactcccattacaaacaaatagagatagcacatacamctagytttgtcctctcgccatcacgtcccgcacatatggcagcaacctgccaactgcatcctcctcccagggarccttccccaccagagccactggccacagagcccctttgcaactcacccaccaaaggcactggagaggtcttcctgtgcagtracacacatgtaaggcatgggccatttgaaacagtgtggatgcatcacaataatacaggcagcagtcatgcaccacagaagtcttttttctcatgcccattcacagaccaggagaatttgctaatcacagttccataggacaagcattttctcagtgagcagatgttcacacagtgctttgtaacagagatgataaacggtgatactggaaggtttt

SEQ ID NO: 93745 - DNA, 600 bp, Chicken  19866894412612_1
gtgcttctggtggctcacatgctttggacactcagatccgtggtgggaaggacccgtctgcgctccgttcatccacatgcccagttttccttccaagagaaaccaaagtgtatcagagggagggagctggggtgtgctgcagagcagctcctggagcagatggctgggagaggagagcggacgtgtgtgcagcactgcgtgtctgcagcgtggacccagggagaaggaaggagcttgttagggtgcagatacagaggagaaagcagagaactgatttctgatgcttccctgaaaacttakatgggagatactgagtgctgtcaaggaatgtgctatccagcataacctagagacacatasgagctgggcccgtgtgcacgcttctttccaggaactgctgccgagcctcacttaagagcatctaaaattaagctgctgcttcagcctctgcagctactgtcaggtggcagcaggggaaggaggcagcctaaaatccagtaggaaaaggcctcgctgcttcttcaggctaaatactgcctgctgargggagcggtgtggaaaggtgctttgtgtgcaggaattgtacccttcatctgttgc

SEQ ID NO: 93746 - DNA, 600 bp, Chicken  19866894412612_2
cgctccgttcatccacatgcccagttttccttccaagagaaaccaaagtgtatcagagggagggagctggggtgtgctgcagagcagctcctggagcagatggctgggagaggagagcggacgtgtgtgcagcactgcgtgtctgcagcgtggacccagggagaaggaaggagcttgttagggtgcagatacagaggagaaagcagagaactgatttctgatgcttccctgaaaacttakatgggagatactgagtgctgtcaaggaatgtgctatccagcataacctagagacacatasgagctgggcccgtgtgcacgcttctttccaggaactgctgccgagcctcacttaagagcatctaaaattaagctgctgcttcagcctctgcagctactgtcaggtggcagcaggggaaggaggcagcctaaaatccagtaggaaaaggcctcgctgcttcttcaggctaaatactgcctgctgargggagcggtgtggaaaggtgctttgtgtgcaggaattgtacccttcatctgttgctcctgtcttccaggttatgtaccttcactgtaaaagaatctatgtataagcaagcaggag

SEQ ID NO: 93747 - DNA, 600 bp, Chicken  19866894412612_3
cagatacagaggagaaagcagagaactgatttctgatgcttccctgaaaacttakatgggagatactgagtgctgtcaaggaatgtgctatccagcataacctagagacacatasgagctgggcccgtgtgcacgcttctttccaggaactgctgccgagcctcacttaagagcatctaaaattaagctgctgcttcagcctctgcagctactgtcaggtggcagcaggggaaggaggcagcctaaaatccagtaggaaaaggcctcgctgcttcttcaggctaaatactgcctgctgargggagcggtgtggaaaggtgctttgtgtgcaggaattgtacccttcatctgttgctcctgtcttccaggttatgtaccttcactgtaaaagaatctatgtataagcaagcaggagagctgttactgattaccctataaaattgttattyccttcttattataatattagcatctcacttgttttaaggttggtaggccagtcctcaatttgagcatttttcctgttttttgagtgttaagcacttcaaaatcggtttagcaaattgttctagcaaaagaatcaattaatattttttttta

SEQ ID NO: 93748 - DNA, 600 bp, Chicken  19866894412612_4
ctgctgccgagcctcacttaagagcatctaaaattaagctgctgcttcagcctctgcagctactgtcaggtggcagcaggggaaggaggcagcctaaaatccagtaggaaaaggcctcgctgcttcttcaggctaaatactgcctgctgargggagcggtgtggaaaggtgctttgtgtgcaggaattgtacccttcatctgttgctcctgtcttccaggttatgtaccttcactgtaaaagaatctatgtataagcaagcaggagagctgttactgattaccctataaaattgttattyccttcttattataatattagcatctcacttgttttaaggttggtaggccagtcctcaatttgagcatttttcctgttttttgagtgttaagcacttcaaaatcggtttagcaaattgttctagcaaaagaatcaattaatatttttttttaaagttggtgttgaaataaagcaaagcttaataatgcaatggaacattgccagctcgcattatctgtagggtttgatacgcctggtgttcacatagcaccccagcactggagcaagctgcaggagagagctgttattcaaagaaaccaac

SEQ ID NO: 93749 - DNA, 600 bp, Chicken  19866894412614_1
acatcacacatggaatgactttaatattgatctaacattttatacaaggaaataatgtaatactgccttataaaaatgactttcaaattctaaatgtcagcattttttaaggaacatgaaaacagctgtacctggtcagaaacaaggtcaggctaactttgcattctgtctctgagagtaccaagcttcctaagtgcttcgtaaaaactgtaagattaaggcaaatacatagagctgctagcctaggttattctctcagcctccagcaatctgcaacccaggagtttttggcaatcagcytaatgaaaaataccagggaaggaacagcaggccaaagtaaggcatgcataagcccagttgtatgtatttgcatacgtaaactaaaaagacataaaagtatctcaaacttttagcttaagagactttgagtagaactgcctttcaaaccttttttaatttttagccttactaaccagcaaacattttactagccaactcaaagaaaattcctctatttttcttcattcttttcatcagtccccacaaccaacaaaatgaaactttggactgtctagcataaatggttaaaaagtgagtaga

SEQ ID NO: 93750 - DNA, 600 bp, Chicken  19866894412614_2
tttgcatacgtaaactaaaaagacataaaagtatctcaaacttttagcttaagagactttgagtagaactgcctttcaaaccttttttaatttttagccttactaaccagcaaacattttactagccaactcaaagaaaattcctctatttttcttcattcttttcatcagtccccacaaccaacaaaatgaaactttggactgtctagcataaatggttaaaaagtgagtagaaacaatataaaataagctttggtggtaatattctgggaatttagactcaaagcacctgtgtatgakaaagagccactgcatccttcagatcttgagccaagattgtcaaaaattactacttaaggttaggcacctaaatctagacacgaaaaagaactggtgcattacaagagccattagtactttgacgtcagaagccactgccccatggctgggcagttttttacagttcagggcaagggacacaagcagtcaggaatcagatgtatagggcaaagaaaaaatttagaagtttatgctgcaaactgtcactcctaaacccctcactcagctgccacctaagtctgaatatacctaaaatctatt

SEQ ID NO: 93751 - DNA, 599 bp, Chicken  19866894412620_1
  misc_feature (1)..(111): n is any nucleotide
nnnnnnnnnnnnnnnnnnnnnnnnnnnnnnnnnnnnnnnnnnnnnnnnnnnnnnnnnnnnnnnnnnnnnnnnnnnnnnnnnnnnnnnnnnnnnnnnnnnnnnnnnnnnnnntcactgtgtaaacagccagtcttgtactaagtctgtaactgacaatcctaagacttttttcttcctgtttgtttgaggtgagggttttgtttgtttgtttgtttgtttgtctccacttgtatttttttcttccacattcctttcagtatgtctctaatagcatcaatgcaggacaaaaccaaaaacctmgagaaatgaatgggaagagcagttgattaaagagattatatctgtatctgggcacgtctcagaaatctggattaaccttcagcaaatgagagtagaaacaagctttaatttagttccaagagtaataaaaatgttctggatggaaatgtgtatcatttaccagcacacccgccttcttactcacatcatctgtatattgcattactcccctgggaacgcattccttcacatttttctccatcaaagccagattgttactatgccacgtaagctgaggcagtacttgaaaagaaagagct

SEQ ID NO: 93752 - DNA, 600 bp, Chicken  19866894412621_1
caggaagaaagaggaaatggcatttcaccaaatttcagaagtccttttgcttagaagggagtaaaagaaaaagaaagctgttctttgctttctttggcattccttatgaggaatattttcaaagctatgaccacaagattggtatcatctgttatagcaaattctgtgaaaagctttaatgtttactgggttgcaatttcaatctgtcttgggcactctctgcaggactccatgtgttataaacgcctctcacctttaaaaccatggtcaaaacctcaccccatggcttggtgaggagarccctaagatataggcaagtttgtgagtctccctggggactaaaattcagggtctcagagctgcawttttgcttctggataagttggtggatccagctctaccctccaacacatccatgtcatcctgytgtctttccaggactttgagagtatggcacaatgcaagtaatctggtgagggcagccagctgctcatagagtttgtcctgaacattcataggaagtttattctcagtctcaggttgcgttgaacccattatttgggctggtcccgatgtcgtttctggacctttattgcttca

SEQ ID NO: 93753 - DNA, 600 bp, Chicken  19866894412621_2
agaaaaagaaagctgttctttgctttctttggcattccttatgaggaatattttcaaagctatgaccacaagattggtatcatctgttatagcaaattctgtgaaaagctttaatgtttactgggttgcaatttcaatctgtcttgggcactctctgcaggactccatgtgttataaacgcctctcacctttaaaaccatggtcaaaacctcaccccatggcttggtgaggagarccctaagatataggcaagtttgtgagtctccctggggactaaaattcagggtctcagagctgcawttttgcttctggataagttggtggatccagctctaccctccaacacatccatgtcatcctgytgtctttccaggactttgagagtatggcacaatgcaagtaatctggtgagggcagccagctgctcatagagtttgtcctgaacattcataggaagtttattctcagtctcaggttgcgttgaacccattatttgggctggtcccgatgtcgtttctggacctttattgcttcagcgctgcagcagaaagtgttgttgtattgcttctgctgattcgggaatctgtctcagcagaaatg

SEQ ID NO: 93754 - DNA, 600 bp, Chicken  19866894412621_3
tgaccacaagattggtatcatctgttatagcaaattctgtgaaaagctttaatgtttactgggttgcaatttcaatctgtcttgggcactctctgcaggactccatgtgttataaacgcctctcacctttaaaaccatggtcaaaacctcaccccatggcttggtgaggagarccctaagatataggcaagtttgtgagtctccctggggactaaaattcagggtctcagagctgcawttttgcttctggataagttggtggatccagctctaccctccaacacatccatgtcatcctgytgtctttccaggactttgagagtatggcacaatgcaagtaatctggtgagggcagccagctgctcatagagtttgtcctgaacattcataggaagtttattctcagtctcaggttgcgttgaacccattatttgggctggtcccgatgtcgtttctggacctttattgcttcagcgctgcagcagaaagtgttgttgtattgcttctgctgattcgggaatctgtctcagcagaaatgctgrgaccagtctgctcccagtgggacttaactcacattcactggcagactggagactgaac

SEQ ID NO: 93755 - DNA, 600 bp, Chicken  19866894412621_4
gcttctggataagttggtggatccagctctaccctccaacacatccatgtcatcctgytgtctttccaggactttgagagtatggcacaatgcaagtaatctggtgagggcagccagctgctcatagagtttgtcctgaacattcataggaagtttattctcagtctcaggttgcgttgaacccattatttgggctggtcccgatgtcgtttctggacctttattgcttcagcgctgcagcagaaagtgttgttgtattgcttctgctgattcgggaatctgtctcagcagaaatgctgrgaccagtctgctcccagtgggacttaactcacattcactggcagactggagactgaaccctcaccttgccgtggacctgaaagacaccagtggctggtgcttccactctgctagcagcyccgtagtcctggaggtcttgtgtgggggtcgccgcccctgggtgtaattcttttttgcccaagagcagtagatggcaaagtgcagttgtgtttaaggatgcaaatggtgggaggcagcaaagagctgggagaccctggatgatcccaccaaagagctgagcagcatctattggcacagggg

SEQ ID NO: 93756 - DNA, 600 bp, Chicken  19866894412621_5
gctcatagagtttgtcctgaacattcataggaagtttattctcagtctcaggttgcgttgaacccattatttgggctggtcccgatgtcgtttctggacctttattgcttcagcgctgcagcagaaagtgttgttgtattgcttctgctgattcgggaatctgtctcagcagaaatgctgrgaccagtctgctcccagtgggacttaactcacattcactggcagactggagactgaaccctcaccttgccgtggacctgaaagacaccagtggctggtgcttccactctgctagcagcyccgtagtcctggaggtcttgtgtgggggtcgccgcccctgggtgtaattcttttttgcccaagagcagtagatggcaaagtgcagttgtgtttaaggatgcaaatggtgggaggcagcaaagagctgggagaccctggatgatcccaccaaagagctgagcagcatctattggcacaggggttggcccaggttcccaaagggaggtgtctgcaacagctgctctctgctggtggagagtgagagccatgcactcgcatgggtgctggtggagaaggtcatcctggggcattctgaagtct

SEQ ID NO: 93757 - DNA, 600 bp, Chicken  19866894412624_1
gggcaaggcagcatgactgcaaccagcagctcccatacacccaccagcagcttttttcagccctgaaaactctaggcataggaggcataaaggggctttaaattcccatatgtcccttcttcctacctgaaaggtcagtactaaagggatatctacagtctcaagaggacccctcatgcttccaatgggccatctatcccttatgcacatgtcagcactgtacccagactaggaaaacaacttggtctctcagacatgctggatagctcaggctcagcaccagctaaccatgaccttaartcttctcaaatcaaccccagactggtgaagggtgtctacagtcagcagagagcccagacactggattttagttcttataaacaagagcaattcctaagaggcagtctgaaattcagggaggtgtagtttaattctaactcatttcaggtgctcatctgcacaggtgacaggaatacagcatttggtcttctctcaagcagagaggagcaggctgggctttctccttcattgccatgagcactttaggagaacaatttatgcagctggaaagtaaattgaaatttttatttccagtgatgt

SEQ ID NO: 93758 - DNA, 600 bp, Chicken  19866894412628_1
gtctttgataggaagtacacttggtctgaaggctacagggaagtttgggatatggtgtttcaatttattcactatgaacactctttgttttcttatttggtactctggtggtaagtaaaccagaatcccttatctgctctcattcaaaagttgattttttttctttttcacctgcgggcttctatgatgagattgaattcaaaataagatgggttagagtgggagtttagacttaaatcacggtgtataaaattaaggatgaacaggacctgtccattctgtcttttgaaaggtctgaayctgaacagtggttcctaacagactgaagcttcaaggagtgaacttggaatcagaaccacgccttggaaaatctggtcacttgagayggaatagataataatcttaaaagtatgtttttatccttttcattaattatatttctacattctggaccaaatgacattctgtaacttcagtgaactcaatgttcgttttgacataacgtcttctctttttgaggttctcatatgcttgtctctaatatttatttttagaaatgtatatcaattctctgcttctctcttaagtctgctctcccag

SEQ ID NO: 93759 - DNA, 600 bp, Chicken  19866894412628_2
gttttcttatttggtactctggtggtaagtaaaccagaatcccttatctgctctcattcaaaagttgattttttttctttttcacctgcgggcttctatgatgagattgaattcaaaataagatgggttagagtgggagtttagacttaaatcacggtgtataaaattaaggatgaacaggacctgtccattctgtcttttgaaaggtctgaayctgaacagtggttcctaacagactgaagcttcaaggagtgaacttggaatcagaaccacgccttggaaaatctggtcacttgagayggaatagataataatcttaaaagtatgtttttatccttttcattaattatatttctacattctggaccaaatgacattctgtaacttcagtgaactcaatgttcgttttgacataacgtcttctctttttgaggttctcatatgcttgtctctaatatttatttttagaaatgtatatcaattctctgcttctctcttaagtctgctctcccagagcacccccagcattgctcatggctcagctctggcagcagtaggtctcttttggagcagctggagctgggtttgatctgacacaga

SEQ ID NO: 93760 - DNA, 503 bp, Chicken  19866894412638_1
atattcattacaagatcttatttgcatgcttgacatttaaaaatattgtgtttggaatgtgttatttattttgagacctttattaagcaacctcagtctgagaagggtttaattgttactgatagctaagagtataattacctcactaaaatatcatgactatattaagcaaatggaaattgtcttacagaatgaagtgagcacaaaccgttttcctttgatacagtctgttccagggacctgctaacaccacttgctgatatgactgcagaatcttgctgcaaggaatgaataaggagrgctgagatcgatgcctttggagctgaagttgtccgtggtagttttgaagaagtttgctaaaaccatttggaaggcagttaaaacagaagagatttgtaggtttcagaaagaggagaaatgcacgtttcctgacacggctcccagcccactgcatgccttttttgttgtgcactttttcattggctccattactttgcctgatg

SEQ ID NO: 93761 - DNA, 600 bp, Chicken  19866894412648_1
cttaagagaataccaggatatatctgttattctttcatgacatcatacttacaaattataaataaccaaaaaaccaagcaatggcatgggtttgggggaatatttgtcatgtgtttcatcttataatctttatgtatattcaaaatggaaattctgtcaaacaaactcctaacatattcagtaatgattctgaacagtcattgaaaaaaatttagtttacatattttttgtatgtcacagccttactggttcttgaaactatgcttgttatgcaccacctatgtgtctcgtcttgctccrtaataaaactttgtatatagctatataacttggaggaacagtgtcttcacaatgttgggggaatgctgagaataagttagatcatcagagatttctctaattctattttgttggaaatgtattggtttaaaaaaaaaaaaaaagaaaagaaaaaaaaagaggggtttctttttttgtgctttgatatgtttattccgtaagtcctatttcagacaacagcaacgacattttgaagtgcaaaataacatgagtggtggagaaagctgtttgaaggcaaaccttatcctttagacctaaaca

SEQ ID NO: 93762 - DNA, 600 bp, Chicken  19866894412650_1
caactattcccttgttctaaatctggggctgacacttcctgcaaatggtaactatcctcagctcccctttccatcctcacagctatcaggggtgtgattcaccagaccttaagacaaatgcactaaactaagctgggtcatctttagagactttgtagagaaatcaacagttttagagtaagagctgtccaattagtttgggatacatgagaggagaacacttcttctttgactttaaagataacttaaggttgctgtctcagagatatctattcagagtagttcttccctagcatgagytatctgacaattctcctgttacaacacaaggtgagattgatcccctggaagatggagtttactttcccataggcaaacatggaatgatgtagattcaaggattataagaacgggcatccaatttatatgaacaatggcaaacaaggctaaagccagccaaagtaaataaaaacagaataacaaaggtcagataaatctatcattttactgcaaattgtttctccttccctttttttcaagatgattcctcattatgatttccaggctctacttcttcagttttcaagaaagctgaaggtt

SEQ ID NO: 93763 - DNA, 600 bp, Chicken  19866894412650_2
cccaataatcctcagcctcagcaagaaatggtcaggacagaaagtggcactgagcttgcaaagtacagaaatgttctggtgacaccagaggtcaaaccaagaacagggaagtgatggtgtttctgtctaagagcaaggcaaagtcatctccctgcatgcatagataagctgcatttaacaattatgctcctggatgaaagcgagcttccaaacagcttctaagctgttatcagtggttacttcattttttaattttttctttttcacatgtacttagaatctcaggaacttcatgcatargaacattctgtaagaaataaccaaaggcaatgaaaggtttattccaggagcccagtgccagctttggaaccaatgaaacaaatgttgaattatttttttttttaaatataaatatccagtgatgcaacgatcctgttagagcaaataccatttggaatgaatgccaaagacaacgaggcctaacacagtaggtacatatttcacagaaaaaaagagaaaaagaagaggtgagtcctggaaatagttaaccaccaacagcccagctgctgcatggcagaggagatacttgtttctcaagac

SEQ ID NO: 93764 - DNA, 600 bp, Chicken  19866894412651_1
gcagtagtcaccaaatataattctttctgaagtctcagaggcctgtgccctgctgcccattcagctgtgctgccaaagagcaggtgagtggaagctatagtgtgaaggctggtcggactggggagcttccacctggggctctaatggagcagtgcttccaggatgaacagcttctcaccagtatgtgaagcaaatcagggtggccagtgagtagcatcactatggtgacactgaacagacatcttgacgtgaggaaggaaggatattttaaagcagcttgcaaagatgggctagcattgyagtttctctcctgttcttgctggtgtgcttctcccccatgctttctatgcagyttgcataattcacaaatatctatagggamattttgtacctatgcaggctaatacagaacatattcctcccctgaaccattgtgaaagtagcaccctaggtcaacctttgccatttcctaacagaagggatttcaccatgcttaccactgcattttgtctttgcaatagttctctcctaaaaccacagaatcatagaatcattaatattggaaasgaccactatgatcatccagtccaactatcagcc

SEQ ID NO: 93765 - DNA, 600 bp, Chicken  19866894412651_2
tgcccattcagctgtgctgccaaagagcaggtgagtggaagctatagtgtgaaggctggtcggactggggagcttccacctggggctctaatggagcagtgcttccaggatgaacagcttctcaccagtatgtgaagcaaatcagggtggccagtgagtagcatcactatggtgacactgaacagacatcttgacgtgaggaaggaaggatattttaaagcagcttgcaaagatgggctagcattgyagtttctctcctgttcttgctggtgtgcttctcccccatgctttctatgcagyttgcataattcacaaatatctatagggamattttgtacctatgcaggctaatacagaacatattcctcccctgaaccattgtgaaagtagcaccctaggtcaacctttgccatttcctaacagaagggatttcaccatgcttaccactgcattttgtctttgcaatagttctctcctaaaaccacagaatcatagaatcattaatattggaaasgaccactatgatcatccagtccaactatcagcccaccccctccatgcccagtagccaccttcctctgtgccacatctgccctttcc

SEQ ID NO: 93766 - DNA, 600 bp, Chicken  19866894412651_3
ggtgagtggaagctatagtgtgaaggctggtcggactggggagcttccacctggggctctaatggagcagtgcttccaggatgaacagcttctcaccagtatgtgaagcaaatcagggtggccagtgagtagcatcactatggtgacactgaacagacatcttgacgtgaggaaggaaggatattttaaagcagcttgcaaagatgggctagcattgyagtttctctcctgttcttgctggtgtgcttctcccccatgctttctatgcagyttgcataattcacaaatatctatagggamattttgtacctatgcaggctaatacagaacatattcctcccctgaaccattgtgaaagtagcaccctaggtcaacctttgccatttcctaacagaagggatttcaccatgcttaccactgcattttgtctttgcaatagttctctcctaaaaccacagaatcatagaatcattaatattggaaasgaccactatgatcatccagtccaactatcagcccaccccctccatgcccagtagccaccttcctctgtgccacatctgccctttccttgacctcctccagggacartgactccac

SEQ ID NO: 93767 - DNA, 600 bp, Chicken  19866894412651_4
ttaaagcagcttgcaaagatgggctagcattgyagtttctctcctgttcttgctggtgtgcttctcccccatgctttctatgcagyttgcataattcacaaatatctatagggamattttgtacctatgcaggctaatacagaacatattcctcccctgaaccattgtgaaagtagcaccctaggtcaacctttgccatttcctaacagaagggatttcaccatgcttaccactgcattttgtctttgcaatagttctctcctaaaaccacagaatcatagaatcattaatattggaaasgaccactatgatcatccagtccaactatcagcccaccccctccatgcccagtagccaccttcctctgtgccacatctgccctttccttgacctcctccagggacartgactccaccacctccctgggcagtctgtgccartgcctcaccactctctgagatgaaatttttcctaatatccagccatgtttctaggaagttgaattaacatttcagaaagaagtatttgttgatcaaactacaatttcctcwtttttcatttatgtttaatattttaactctggccatggacagggttata

SEQ ID NO: 93768 - DNA, 600 bp, Chicken  19866894412651_5
tatagggamattttgtacctatgcaggctaatacagaacatattcctcccctgaaccattgtgaaagtagcaccctaggtcaacctttgccatttcctaacagaagggatttcaccatgcttaccactgcattttgtctttgcaatagttctctcctaaaaccacagaatcatagaatcattaatattggaaasgaccactatgatcatccagtccaactatcagcccaccccctccatgcccagtagccaccttcctctgtgccacatctgccctttccttgacctcctccagggacartgactccaccacctccctgggcagtctgtgccartgcctcaccactctctgagatgaaatttttcctaatatccagccatgtttctaggaagttgaattaacatttcagaaagaagtatttgttgatcaaactacaatttcctcwtttttcatttatgtttaatattttaactctggccatggacagggttatatttttctaggggttctgttcatataaaaatattaaaaccatatacagccatatagagtttggatccctggtggaaatagatgtaaagactaggaacagagtgatcc

SEQ ID NO: 93769 - DNA, 600 bp, Chicken  19866894412651_6
agaacatattcctcccctgaaccattgtgaaagtagcaccctaggtcaacctttgccatttcctaacagaagggatttcaccatgcttaccactgcattttgtctttgcaatagttctctcctaaaaccacagaatcatagaatcattaatattggaaasgaccactatgatcatccagtccaactatcagcccaccccctccatgcccagtagccaccttcctctgtgccacatctgccctttccttgacctcctccagggacartgactccaccacctccctgggcagtctgtgccartgcctcaccactctctgagatgaaatttttcctaatatccagccatgtttctaggaagttgaattaacatttcagaaagaagtatttgttgatcaaactacaatttcctcwtttttcatttatgtttaatattttaactctggccatggacagggttatatttttctaggggttctgttcatataaaaatattaaaaccatatacagccatatagagtttggatccctggtggaaatagatgtaaagactaggaacagagtgatccaaatatcaaaatgaaaaataaacagaaacaggca

SEQ ID NO: 93770 - DNA, 538 bp, Chicken  19866894412651_7
tagttctctcctaaaaccacagaatcatagaatcattaatattggaaasgaccactatgatcatccagtccaactatcagcccaccccctccatgcccagtagccaccttcctctgtgccacatctgccctttccttgacctcctccagggacartgactccaccacctccctgggcagtctgtgccartgcctcaccactctctgagatgaaatttttcctaatatccagccatgtttctaggaagttgaattaacatttcagaaagaagtatttgttgatcaaactacaatttcctcwtttttcatttatgtttaatattttaactctggccatggacagggttatatttttctaggggttctgttcatataaaaatattaaaaccatatacagccatatagagtttggatccctggtggaaatagatgtaaagactaggaacagagtgatccaaatatcaaaatgaaaaataaacagaaacaggcacaaagaggacagtttccatgtctggatcagaaagcttctgccagcactt

SEQ ID NO: 93771 - DNA, 599 bp, Chicken  19866894412663_1
  misc_feature (1)..(119): n is any nucleotide
nnnnnnnnnnnnnnnnnnnnnnnnnnnnnnnnnnnnnnnnnnnnnnnnnnnnnnnnnnnnnnnnnnnnnnnnnnnnnnnnnnnnnnnnnnnnnnnnnnnnnnnnnnnnnnnnnnnnnnnacattcagaagacagcataattaaaacaaggacagaattcatgaattcatgaagcatttactatgtaagccaaagaaaagataaattatatgcctgtaatgtttcactgagccgtgattcatacaaacaaaagtgctggcaggaatacattcttttaaatgtttttctaatgactgaaccraaacgacagtgtaagtacttaaggtgtttattacccccaractgggatccccaaagaaattaattgaacatttgcatgggatctgttaacttctaatggtgactttcttctgttactctgagagttttctttcattactatttgcctccagggccctgcacaatgcattacacagtgagctgctgcagagccttctgtggtcrtttgacaatggctcttaaaatgtgttattgtaggactctatgctatctctccttgatttatatgctgaaggcttgagtctgtactccttcctacag

SEQ ID NO: 93772 - DNA, 599 bp, Chicken  19866894412663_2
  misc_feature (1)..(79): n is any nucleotide
nnnnnnnnnnnnnnnnnnnnnnnnnnnnnnnnnnnnnnnnnnnnnnnnnnnnnnnnnnnnnnnnnnnnnnnnnnnnnnnacattcagaagacagcataattaaaacaaggacagaattcatgaattcatgaagcatttactatgtaagccaaagaaaagataaattatatgcctgtaatgtttcactgagccgtgattcatacaaacaaaagtgctggcaggaatacattcttttaaatgtttttctaatgactgaaccraaacgacagtgtaagtacttaaggtgtttattacccccaractgggatccccaaagaaattaattgaacatttgcatgggatctgttaacttctaatggtgactttcttctgttactctgagagttttctttcattactatttgcctccagggccctgcacaatgcattacacagtgagctgctgcagagccttctgtggtcrtttgacaatggctcttaaaatgtgttattgtaggactctatgctatctctccttgatttatatgctgaaggcttgagtctgtactccttcctacagcagtgttcccacaaaggcaagaaagatcactgcatctacc

SEQ ID NO: 93773 - DNA, 600 bp, Chicken  19866894412663_3
attatatgcctgtaatgtttcactgagccgtgattcatacaaacaaaagtgctggcaggaatacattcttttaaatgtttttctaatgactgaaccraaacgacagtgtaagtacttaaggtgtttattacccccaractgggatccccaaagaaattaattgaacatttgcatgggatctgttaacttctaatggtgactttcttctgttactctgagagttttctttcattactatttgcctccagggccctgcacaatgcattacacagtgagctgctgcagagccttctgtggtcrtttgacaatggctcttaaaatgtgttattgtaggactctatgctatctctccttgatttatatgctgaaggcttgagtctgtactccttcctacagcagtgttcccacaaaggcaagaaagatcactgcatctacccaaggccagctttgagcgagttgtactggggtggataatggcaatctggtttgggactcctggcctgggggctccgtgtgccatgggtcacctggtggcctctttgtgctctgtgcatcagattgcaggggtttctggattgaagcattgtgcctccagctctt

SEQ ID NO: 93774 - DNA, 600 bp, Chicken  19866894412667_1
atgggaaacaatcagaatctatcacagtcctcccgcagctgctaacaagatcttctgtagcctttgacaccaccccatgaaataaagcaacacaagccatcttattagcgctcagcgtgcacctacaaatgggctgcactctcagggcactcggttctgcaatgagcagctcagtcccatcagctggaaatctctccactcccctcaatgtccataaaggcaatgtcgtagccccaggagggcttgggccatgtcctggaggtggcatccatctcacccaacatcttcgtccaatcctcrggatttcccatccaacctcccctctctcttctcctgcatcccagctcaaaactgcacaggtttttcagtcatgttgctgcattccccagcagctccctcrtcagtgccatgagcctcaggctgtggtaaggcagctgagttcccattgcctacttatatttttgtcacattactaaagaagaaattctgccatcagcacacgtaatctgctggaaaataaaaacacatggaaatcacctgcaaggtgtgctattttagatgggactgctaatgtaggtcaggttttccattctcctctgg

SEQ ID NO: 93775 - DNA, 600 bp, Chicken  19866894412667_2
cttattagcgctcagcgtgcacctacaaatgggctgcactctcagggcactcggttctgcaatgagcagctcagtcccatcagctggaaatctctccactcccctcaatgtccataaaggcaatgtcgtagccccaggagggcttgggccatgtcctggaggtggcatccatctcacccaacatcttcgtccaatcctcrggatttcccatccaacctcccctctctcttctcctgcatcccagctcaaaactgcacaggtttttcagtcatgttgctgcattccccagcagctccctcrtcagtgccatgagcctcaggctgtggtaaggcagctgagttcccattgcctacttatatttttgtcacattactaaagaagaaattctgccatcagcacacgtaatctgctggaaaataaaaacacatggaaatcacctgcaaggtgtgctattttagatgggactgctaatgtaggtcaggttttccattctcctctgggctgcatgtatttattaggaaacatcttacaaattcggaattttgaatcctgtgctccattgtcttttagaggaaaaatcacatcacgcatatactattc

SEQ ID NO: 93776 - DNA, 600 bp, Chicken  19866894412669_1
caacatctgagcccagcccacgctattctgggctggcagcccctacctatcctgctatcagaaggggctcaatgtctcagaatattcggattgctgtgtctctgctatctgctaacctgtcctgtccctcctcagctgctggatcagtgtttggctccagacacctcaggggatggcactggctgcgataacatgacctgcatcattatcagttttaaaccccgcaatacacacccacctgctgaaagtgggaagaggaaactggaggacgtggcagcactggcagcaccagcagaggaraacggcagcgataagaagaaggccaagctggaatagcaagcctcgcacagggactgtgctgtgcgctcactagactctcgtttcttaaacatgctgaactcaagactccaaagtcttgtcctttttttagccttagcagaggccttgtttgtccgtgtcctggttggggggtggggggcgggtctggttagcaagggcatgtggcactgttcatctgtaaccattccaaagagagagccaagggcagagctgcgcgcgggagcagccaccggccgcggcgtgggagcccaccatcggtgg

SEQ ID NO: 93777 - DNA, 600 bp, Chicken  19866894412672_1
tagaatgtattgcaaatggctttaatgtacattcacacatgagggtacaatttttaatcaagatatttttttaaattaaaaagtgtttctgcatagtggtgtttcctgcaatttctcatcatgaaaagatgctgtgttctagctgcaaacacaggggtattcaacccaacaaagcaaccttaagcagagaacagagaaatacatgtttttgcagtttattattttttctattcctgtgcaaaaaacatatttgtttcacaaaatagaacctgaagattagcattgtggtaaagtctgaamgcagacactatgtgccatgatctggctgccctgcaggcaccgaaaccaaactgactgttcacagaattatagaacatcttggtttggaaacaacttcaaagatcaggtagtcccaacccctgtgccatgggcagggctgcagccctccagaccaggctgcccagggccacatccaacctggccttgagcacctccagggatggggcaccacagcttctctgggcagctrtgccagggcctcactgcactcccactgaaaattttcccctcacatcttacctaaatctcccttcctttggt

SEQ ID NO: 93778 - DNA, 600 bp, Chicken  19866894412672_2
attcctgtgcaaaaaacatatttgtttcacaaaatagaacctgaagattagcattgtggtaaagtctgaamgcagacactatgtgccatgatctggctgccctgcaggcaccgaaaccaaactgactgttcacagaattatagaacatcttggtttggaaacaacttcaaagatcaggtagtcccaacccctgtgccatgggcagggctgcagccctccagaccaggctgcccagggccacatccaacctggccttgagcacctccagggatggggcaccacagcttctctgggcagctrtgccagggcctcactgcactcccactgaaaattttcccctcacatcttacctaaatctcccttcctttggtttaaaaccattcctccttgtcttatcactatctacctatgtaaaaggttgatttccctcctgtttctagtctccctttaaatactggaaggttgcaagcccagttcccccagcctgtctttgtatgagaggtgcttcagccctctgatcatcttcctgatcctcctctggacccactccagcagctccatgttcttcctacattggttgcccaggcctggacgtagtac

SEQ ID NO: 93779 - DNA, 600 bp, Chicken  19866894412676_1
cattggtctcgcttcctaccattgcataaatgatgtgaagggataacgctgcagctgagttggctgacttaacactaagttgaggaaaacgccagagctgctctattgaggcttctgtcattaaaatgagcttagaggctaagtagaatgattgtgaagcaatagttctccaaggtatttactgtctaaccaagctgtcacatttcgagttgtatggttatcaaaatgcttgctttggcacaacatgcaaaatgaacggcatttcggaagcacgactaggtttgaagataattagcacaygcagaagcatttaaataccatgtttggtgactggacaggttccctgctgaaggagagcctctggtcaacaggggaatctgagaaatggatatagctggtatctggagtacctgtagtggacacagagtattcatggaagtgtttactttcagtgaattgagccagtggtgaatcttgtgcagcgttgcaatggattttgtgacattcatcagattcacacatattccacagaagagctgcacttcgcatgtctgtgctttatgtctgcccatctgaaggaaatatgcatgaaggaattta

SEQ ID NO: 93780 - DNA, 600 bp, Chicken  19866894412676_2
atgcagagtagcatttgaaagatttaactgacaaaaacctctgcatttctttcaaaggcaggcagttacaaaccagtgtctggaacgtctaatttgcatatggaagtatgctaattagattgttttttcttcagtgccagtaaccttaatgaagtatcattgatctgaggtccaggctaaaagtggacttttaaagtaggaagtgtgattgaaggtcgtgggcatctgacgttgtagtcatgttcgtggtgtcaaactgccactgccagacaggaagaggctttggtttgcaataatggmaagatgagactcagcctgccagttctgggactctgggtcctctgtttaaatgccctgaagatctggctgttctgaaaaaaattgggacgctttgaggtatgcaccaaaatgaaattgcctatgcttcagtgtatggatccatacgcatgatttaggattgtgtttttttgggaggagaaggtaagaacaatttgctctaaggtcagtgttcttaattcttaaatctttatagcagtatgaagtagtgccattgttagaatcctgcattacttatcaaaaggcaggcatatgtttgccata

SEQ ID NO: 93781 - DNA, 599 bp, Chicken  19866894412678_1
  misc_feature (1)..(134): n is any nucleotide
nnnnnnnnnnnnnnnnnnnnnnnnnnnnnnnnnnnnnnnnnnnnnnnnnnnnnnnnnnnnnnnnnnnnnnnnnnnnnnnnnnnnnnnnnnnnnnnnnnnnnnnnnnnnnnnnnnnnnnnnnnnnnnnnnnnnnnaagccagcagcctcagtagcacagccctttggggctgcaggatgaagaactccatccatccccctcacttgccctctgcctttgcctatctccttcctgcagggacaccttcccaaggagagaatggaaggaatggaagaagtaaatctttctgagttatttctgrgctgctggctgggcaaaggtgttctttctatttctggggcagggtgacaaagtaaaaagagaagataaaaagccggctgcaaagagcccttccaaatcgactccgttttctttggctgctccaaaactcccatgaacgtggtaaatagcctaaatctctttttcccctgtctagttttgactgaaaagtaggaaagctgattctgagaagagctggaaggagggaagagcaagtttagtctctgcacgcagggccagcttggcagtgggatttgcacacatgtgccatcttatagggaa

SEQ ID NO: 93782 - DNA, 599 bp, Chicken  19866894412686_1
  misc_feature (1)..(69): n is any nucleotide
nnnnnnnnnnnnnnnnnnnnnnnnnnnnnnnnnnnnnnnnnnnnnnnnnnnnnnnnnnnnnnnnnnnnnacatttaaattttattgtaagattcatcagcataacctcttccataagcagtagaggagctgcgtaaccagaaaaagtagggaagtgtagtctaagaaattcaaagacttcatctcagaaaaatcttgttatcagaatgcatttttaaagagcagcatgccaggctgctttgatcatttcttgctcttatcaggccattgcattttgacctcactagcaacttagcataaygagtagcacctattgaaaagaattatgaataacagatcatacatgcatcacacaattcaaaatgrattacaactatcatycamgatagaagaatagataatgattgaagagctttatgaatagtcactgttcagtaacagcctgcactgagtacttagacaacatcatgtaataatataaaaatgccaacaagaaaaaaaaaatctttttcacaatattttcttcttctaggagtcatcwtcagagaaaaactaagcacctctaggagcatacacaatagaatatttgggattaaagct

SEQ ID NO: 93783 - DNA, 599 bp, Chicken  19866894412686_2
  misc_feature (1)..(4): n is any nucleotide
nnnnacatttaaattttattgtaagattcatcagcataacctcttccataagcagtagaggagctgcgtaaccagaaaaagtagggaagtgtagtctaagaaattcaaagacttcatctcagaaaaatcttgttatcagaatgcatttttaaagagcagcatgccaggctgctttgatcatttcttgctcttatcaggccattgcattttgacctcactagcaacttagcataaygagtagcacctattgaaaagaattatgaataacagatcatacatgcatcacacaattcaaaatgrattacaactatcatycamgatagaagaatagataatgattgaagagctttatgaatagtcactgttcagtaacagcctgcactgagtacttagacaacatcatgtaataatataaaaatgccaacaagaaaaaaaaaatctttttcacaatattttcttcttctaggagtcatcwtcagagaaaaactaagcacctctaggagcatacacaatagaatatttgggattaaagcttttttatcttccttgtttcagaaaacaaagatattgcaataagyttagaataaaagcaaactttg

SEQ ID NO: 93784 - DNA, 600 bp, Chicken  19866894412686_3
ttattgtaagattcatcagcataacctcttccataagcagtagaggagctgcgtaaccagaaaaagtagggaagtgtagtctaagaaattcaaagacttcatctcagaaaaatcttgttatcagaatgcatttttaaagagcagcatgccaggctgctttgatcatttcttgctcttatcaggccattgcattttgacctcactagcaacttagcataaygagtagcacctattgaaaagaattatgaataacagatcatacatgcatcacacaattcaaaatgrattacaactatcatycamgatagaagaatagataatgattgaagagctttatgaatagtcactgttcagtaacagcctgcactgagtacttagacaacatcatgtaataatataaaaatgccaacaagaaaaaaaaaatctttttcacaatattttcttcttctaggagtcatcwtcagagaaaaactaagcacctctaggagcatacacaatagaatatttgggattaaagcttttttatcttccttgtttcagaaaacaaagatattgcaataagyttagaataaaagcaaactttggctgtttgtaataatc

SEQ ID NO: 93785 - DNA, 600 bp, Chicken  19866894412686_4
ttgtaagattcatcagcataacctcttccataagcagtagaggagctgcgtaaccagaaaaagtagggaagtgtagtctaagaaattcaaagacttcatctcagaaaaatcttgttatcagaatgcatttttaaagagcagcatgccaggctgctttgatcatttcttgctcttatcaggccattgcattttgacctcactagcaacttagcataaygagtagcacctattgaaaagaattatgaataacagatcatacatgcatcacacaattcaaaatgrattacaactatcatycamgatagaagaatagataatgattgaagagctttatgaatagtcactgttcagtaacagcctgcactgagtacttagacaacatcatgtaataatataaaaatgccaacaagaaaaaaaaaatctttttcacaatattttcttcttctaggagtcatcwtcagagaaaaactaagcacctctaggagcatacacaatagaatatttgggattaaagcttttttatcttccttgtttcagaaaacaaagatattgcaataagyttagaataaaagcaaactttggctgtttgtaataatcaag

SEQ ID NO: 93786 - DNA, 600 bp, Chicken  19866894412686_5
gatcatttcttgctcttatcaggccattgcattttgacctcactagcaacttagcataaygagtagcacctattgaaaagaattatgaataacagatcatacatgcatcacacaattcaaaatgrattacaactatcatycamgatagaagaatagataatgattgaagagctttatgaatagtcactgttcagtaacagcctgcactgagtacttagacaacatcatgtaataatataaaaatgccaacaagaaaaaaaaaatctttttcacaatattttcttcttctaggagtcatcwtcagagaaaaactaagcacctctaggagcatacacaatagaatatttgggattaaagcttttttatcttccttgtttcagaaaacaaagatattgcaataagyttagaataaaagcaaactttggctgtttgtaataatcaagcatgcttattactgatcattcttgaatttaagrtctttagatccatctgtctttattcaggagagatgcagttttgaactacactgaccgtgtagttcatgtatgaaaacatatactatgttttcaaaacaatattcttaaagcaaagtagcaaaca

SEQ ID NO: 93787 - DNA, 600 bp, Chicken  19866894412686_6
tgcatcacacaattcaaaatgrattacaactatcatycamgatagaagaatagataatgattgaagagctttatgaatagtcactgttcagtaacagcctgcactgagtacttagacaacatcatgtaataatataaaaatgccaacaagaaaaaaaaaatctttttcacaatattttcttcttctaggagtcatcwtcagagaaaaactaagcacctctaggagcatacacaatagaatatttgggattaaagcttttttatcttccttgtttcagaaaacaaagatattgcaataagyttagaataaaagcaaactttggctgtttgtaataatcaagcatgcttattactgatcattcttgaatttaagrtctttagatccatctgtctttattcaggagagatgcagttttgaactacactgaccgtgtagttcatgtatgaaaacatatactatgttttcaaaacaatattcttaaagcaaagtagcaaacagaaaaaacatacaatatttccatgtagtgactttgctaaatactaagttacttagacttaattctacttagcaaaacgtcattacaatctttaaaagtacctg

SEQ ID NO: 93788 - DNA, 553 bp, Chicken  19866894412686_7
tgaatagtcactgttcagtaacagcctgcactgagtacttagacaacatcatgtaataatataaaaatgccaacaagaaaaaaaaaatctttttcacaatattttcttcttctaggagtcatcwtcagagaaaaactaagcacctctaggagcatacacaatagaatatttgggattaaagcttttttatcttccttgtttcagaaaacaaagatattgcaataagyttagaataaaagcaaactttggctgtttgtaataatcaagcatgcttattactgatcattcttgaatttaagrtctttagatccatctgtctttattcaggagagatgcagttttgaactacactgaccgtgtagttcatgtatgaaaacatatactatgttttcaaaacaatattcttaaagcaaagtagcaaacagaaaaaacatacaatatttccatgtagtgactttgctaaatactaagttacttagacttaattctacttagcaaaacgtcattacaatctttaaaagtacctgaattttacgagcacaaacctgagagg

SEQ ID NO: 93789 - DNA, 484 bp, Chicken  19866894412688_1
ctagaaatgcaactctccagtctgctaccctcactttctttttttttttcttccctgctcaaatactttatataactgtgtcgtgcaccacacatatcagtctggtacttttgagattaataccatttttaacccaatggcactgtataataagtgagaatctgggaatacaaattcttactgccaaagggtcattttaaagaaagattaatcatctaccttgctatttcttaaatagccttaactgtatgctatccctgagaaacttttgctgttatataataaatgactacctaaagmcagatttgataaaaatatacatatgcatttactaaaagatatcttaaaaaaaaaatcactcgcccctgcatcatcaaactccttcttccaaattcaatcagagaagattcttccagaggtgggtttcgtgtgagacacaaggatccattatcttatcctgcagacgccgttactgccaacaaga

SEQ ID NO: 93790 - DNA, 600 bp, Chicken  19866894412692_1
gggagagggacacaatgaactgctatgaaaatgtttacctgggctttatgatggctgagaatattttttgatctacagttcctattttttttcctttttttgtgctccacacctgcagtatctgaactccctggtatatggcatctgccttctcaggaacccattgttgcccactaggatactcttgttatagctttcccagcatcacctggtactttatggcttgaattttgcttgttggctgggcctacccagtccaaccacagatttaaataaaagtgtaatgaaatccaaaggcaygctcttacagctgaggcaggcagtctattccttaaagtgacaagctttaccaaaccaatttttcaaaagggcatgagggcaagacttttcacctctgatgcacatatcccgaaggctaaattgactagaaggtccgctaaagctgactgacagtaggcttacatttactgtatatacctctccaggaaaaataatcaaggactcccaaatgaaaataaaaattgaaaaccactggtgcaaagtaatgtttcaatgtttgtttaggatctgctgatctgactggaaacatgctgcacctgg

SEQ ID NO: 93791 - DNA, 599 bp, Chicken  19866894412693_1
  misc_feature (1)..(95): n is any nucleotide
nnnnnnnnnnnnnnnnnnnnnnnnnnnnnnnnnnnnnnnnnnnnnnnnnnnnnnnnnnnnnnnnnnnnnnnnnnnnnnnnnnnnnnnnnnnnnnntcaccagcatgcctctggcactcaatggattttctagattggttcttatgagtttttgtattttcacaacgttattaggtcttcttacgcatggagaaaattattggctgtttctaacaaactcagggacctccttttgtgaaacaaatggagaacagagcagtaatttctgacctttacctaggatgatttatctagcccaatwcttatgttagtaatccaaaaaagtgggttggtcactattcaatcccccttgctgctactgggaaatgatccagatatagcaagaggaaattactggactgtgacacaaaggtgtaacttcaccaattgtcactgtcttacccatttatcatacttctccatttcacagaggttcctataaatccccctgtgccacctgtgtgatgctgcatagttagcatcaccgcatcctttcctcctcatyccctcccagtaccgctccagctgcaccctctgcctcaacattctgctcattatcaa

SEQ ID NO: 93792 - DNA, 585 bp, Chicken  19866894412693_2
tggagaacagagcagtaatttctgacctttacctaggatgatttatctagcccaatwcttatgttagtaatccaaaaaagtgggttggtcactattcaatcccccttgctgctactgggaaatgatccagatatagcaagaggaaattactggactgtgacacaaaggtgtaacttcaccaattgtcactgtcttacccatttatcatacttctccatttcacagaggttcctataaatccccctgtgccacctgtgtgatgctgcatagttagcatcaccgcatcctttcctcctcatyccctcccagtaccgctccagctgcaccctctgcctcaacattctgctcattatcaagcactactttgccctctggtgtgggatcgctccatttaaatcccagcaggaagtatttttgagctgctacaaccagctcacaccatgtttctggtcaggctggaagcgtgactggcagtaaggtttgcatcatgccctgcccctgagccgtcttggctgtacagacatctgctgcactgccagttccacatcctgcatgctatcaaagactgcagtcagtgggaatgat

SEQ ID NO: 93793 - DNA, 600 bp, Chicken  19866894412697_1
gtgtcctgtttgataactttattgatgacctggatgagggcattgaatgcactctcagtaagtttgcaaaagacaccaggtttggatgaagtgttggtctgcctgggagaagaaaggccctacagagcagtctggacagactggatagctgagatgagttcactggaatggagttcaataagaccaagtgccaggtcctgcaccttggctgcaacaaccccaggcaatcctacaggcttggggcagagtactcagaagactgtgaagaggaaacagatctgaaggtattggtcaaagctytgctgagcatgagccagcactgtgctcaggtggccaagaaggccaatggcatcctggcttgtatcagaaatagtgttgccagcaggagcagggaggtgatcatccttctttactcagccctggtgaggctgcacctggagtactgtgttcagttttcggcacctcactacaataaatacattgaggtcctggagtgttttagagaagggtaacaaagctgtgagggatctgtcttatgagaaacagctacaaaagtcatataagacttttgaggaaaaaagtcttatgagacctatgaga

SEQ ID NO: 93794 - DNA, 600 bp, Chicken  19866894412698_1
caagcacagcaacatcaagagcctgtgtttcatcacttgagacaacaggttggagactttcttcaagttctctgatgagtcaaactgctctttaatttctccttctatttctggagttcctcaagcgcaaggagttttcgaggcagaaacaatgcaagcagataaactcagcattcaggaacctaaaacaccagcaatgctgttgaaaacaccttaattttcttaagcatatttaaatgttgatctctttactgagatcctagaatcgtggctgatataaatggttcaaatgattaaatyttcagtaggatgttagatactgaagttgttataatgatcaggtattaagtaaataagtggtattattagctaggaaaataaccaaaacactattttgatgagacaaaaaataaataataattacaaaaaagtcccctgcaattaaagcccaaagtccagcccaatatcttgcttccagcagccgccaagagctggagtcaaggcaaaaacagagcggagcaagtgstaagtcatagratcactaaggctggaaaagaccccccagatcatccagtccaaccacccacccacaacaatatt

SEQ ID NO: 93795 - DNA, 600 bp, Chicken  19866894412698_2
gcatatttaaatgttgatctctttactgagatcctagaatcgtggctgatataaatggttcaaatgattaaatyttcagtaggatgttagatactgaagttgttataatgatcaggtattaagtaaataagtggtattattagctaggaaaataaccaaaacactattttgatgagacaaaaaataaataataattacaaaaaagtcccctgcaattaaagcccaaagtccagcccaatatcttgcttccagcagccgccaagagctggagtcaaggcaaaaacagagcggagcaagtgstaagtcatagratcactaaggctggaaaagaccccccagatcatccagtccaaccacccacccacaacaatatttccccactaaaccatgccccttagtacagcatctaaacatttcttgaacacctccagggatggtgactccaccaccttcctgggcagcccattccagtgcctgaccactcttttggtgaagaaatgtttcctaacatccaatctaaacctcccttgatgcaacttgaggccattccctcacatcctatcgctgttatccgaaagaagaggccaacccccacctcac

SEQ ID NO: 93796 - DNA, 600 bp, Chicken  19866894412698_3
tgttgatctctttactgagatcctagaatcgtggctgatataaatggttcaaatgattaaatyttcagtaggatgttagatactgaagttgttataatgatcaggtattaagtaaataagtggtattattagctaggaaaataaccaaaacactattttgatgagacaaaaaataaataataattacaaaaaagtcccctgcaattaaagcccaaagtccagcccaatatcttgcttccagcagccgccaagagctggagtcaaggcaaaaacagagcggagcaagtgstaagtcatagratcactaaggctggaaaagaccccccagatcatccagtccaaccacccacccacaacaatatttccccactaaaccatgccccttagtacagcatctaaacatttcttgaacacctccagggatggtgactccaccaccttcctgggcagcccattccagtgcctgaccactcttttggtgaagaaatgtttcctaacatccaatctaaacctcccttgatgcaacttgaggccattccctcacatcctatcgctgttatccgaaagaagaggccaacccccacctcaccacaacctccc

SEQ ID NO: 93797 - DNA, 600 bp, Chicken  19866894412698_4
tacagcatctaaacatttcttgaacacctccagggatggtgactccaccaccttcctgggcagcccattccagtgcctgaccactcttttggtgaagaaatgtttcctaacatccaatctaaacctcccttgatgcaacttgaggccattccctcacatcctatcgctgttatccgaaagaagaggccaacccccacctcaccacaacctcccttcaggtagctgtggagagtaatagggcatctcctgagcctcctcttctgcagactaaagaattccagttccctcagctgctcctcrtaagacttgcattccagatccctcacagcttcactgctgttctctagactgaaraaagatagctctggtgcaagccccagaagctgcatttgcatgcaacaggtcccacaggtaattcttacaataattctcctcacttgttctgcagcaatgagctctgcagctaggttcctgtcatgaaggactgcctttctgggctggcctcatcctgccacctcccaccccagaacayctttacctccagggccgttgcacagctctgccatgccctgaacctcctacccttctcctgcccatcat

SEQ ID NO: 93798 - DNA, 600 bp, Chicken  19866894412698_5
cctgggcagcccattccagtgcctgaccactcttttggtgaagaaatgtttcctaacatccaatctaaacctcccttgatgcaacttgaggccattccctcacatcctatcgctgttatccgaaagaagaggccaacccccacctcaccacaacctcccttcaggtagctgtggagagtaatagggcatctcctgagcctcctcttctgcagactaaagaattccagttccctcagctgctcctcrtaagacttgcattccagatccctcacagcttcactgctgttctctagactgaaraaagatagctctggtgcaagccccagaagctgcatttgcatgcaacaggtcccacaggtaattcttacaataattctcctcacttgttctgcagcaatgagctctgcagctaggttcctgtcatgaaggactgcctttctgggctggcctcatcctgccacctcccaccccagaacayctttacctccagggccgttgcacagctctgccatgccctgaacctcctacccttctcctgcccatcatctcttctccagactgcagagctgcatctacttcatcatcccttatgcaaaggct

SEQ ID NO: 93799 - DNA, 573 bp, Chicken  19866894412698_6
taatagggcatctcctgagcctcctcttctgcagactaaagaattccagttccctcagctgctcctcrtaagacttgcattccagatccctcacagcttcactgctgttctctagactgaaraaagatagctctggtgcaagccccagaagctgcatttgcatgcaacaggtcccacaggtaattcttacaataattctcctcacttgttctgcagcaatgagctctgcagctaggttcctgtcatgaaggactgcctttctgggctggcctcatcctgccacctcccaccccagaacayctttacctccagggccgttgcacagctctgccatgccctgaacctcctacccttctcctgcccatcatctcttctccagactgcagagctgcatctacttcatcatcccttatgcaaaggctgttgaatagccttctgcgtgaccgacagcttttgcagtactattttatgctctttgtaggtggaagtgaggaaggaaaagagaattaggagaaagatgtcagaatcaatcgcactattcaagatgaaggcacatcacagatgcgtactgtg

SEQ ID NO: 93800 - DNA, 600 bp, Chicken  19866894412703_1
attttttttataatttgggcatttggtgacattttagtgctggagggaaggaaaggatgaagtctcatgagaaatccatctgatctcttataacttttggggttttttttggctgtctgtatcctcagagcaaaggtattccacccagatgagcaataagctctttctaacagtatttacattatacagctggttctgagaactgaattactcagaactgggactccagaaaggctttgcccaaggagagctgagctacagcagggaaccaccagggaatggtgctgctcactctgtccwtttgctcacrgaaaccacatcatgtgtaataataccagcaccaatctgggaactgggcagaaggtgtttaaaagctccctgccccattgcagaggtccaaccttggtcttcccacccaggtgcaccttgcagtgagccttttcaagatcaagctctatctggactgtaaaaaaatagcagagagacccatcaacactgttggcagcatctccaccgctggcttcatcatgctgggaaaagtgacgcggaccagagggcccaggagtggatcagcatcggtgagtgcccggaggtgcctgc

SEQ ID NO: 93801 - DNA, 600 bp, Chicken  19866894412703_2
taatttgggcatttggtgacattttagtgctggagggaaggaaaggatgaagtctcatgagaaatccatctgatctcttataacttttggggttttttttggctgtctgtatcctcagagcaaaggtattccacccagatgagcaataagctctttctaacagtatttacattatacagctggttctgagaactgaattactcagaactgggactccagaaaggctttgcccaaggagagctgagctacagcagggaaccaccagggaatggtgctgctcactctgtccwtttgctcacrgaaaccacatcatgtgtaataataccagcaccaatctgggaactgggcagaaggtgtttaaaagctccctgccccattgcagaggtccaaccttggtcttcccacccaggtgcaccttgcagtgagccttttcaagatcaagctctatctggactgtaaaaaaatagcagagagacccatcaacactgttggcagcatctccaccgctggcttcatcatgctgggaaaagtgacgcggaccagagggcccaggagtggatcagcatcggtgagtgcccggaggtgcctgctttggaaatt

SEQ ID NO: 93802 - DNA, 600 bp, Chicken  19866894412704_1
ggtatagcaaccaaaattaccacagatccatgaagctggattatcctcgacagttcctttttcttacgtgcactttacagtcagtttagtccaggagagtctgatcctattgaaactgatttcaggtaagctggattatttctgtactaatcattcacatatattcacataatgaatttttgttaccgcaccgtgttcatgtttacctactcctttataacacgtatacctgaagaaaaacaactgtgctctgaggtctgctactgactgaagtactcagcaggaattctagtttgaaayggcactgtaaagaactgaagtacgtaccaatctgagattcttctggatgacgcctttgcatgtgaccttgtaaaaaggaatagttcataaaagccttttcacagaactgacactacaaaaaatagataacaataattattattcggtacatatagcagtgtttatattattttgtccagacatcaaaagcatattgaaaatctatgcagaaaggctgttctaagtcttgacttctcatctcattattattttcccagacaagcaaaaaaggaatttattaaaaaaggtaaaaaaaaaaaa

SEQ ID NO: 93803 - DNA, 600 bp, Chicken  19866894412704_2
attgcaaacttcatcaaaaacacaaagtaacaaaacaaacagacaaacaaacacaacagaaaaagctatttgttcactttataacttgtcctgcattctaatgggatgcacgacaatttctaccttacagtcacatcttaagtccagcttagatcctaactggaaaaaaatttatcaccttcaaagtatatcactgtaatgttcggaatactaaaaacagacagataacgcaagaacaggagctgtattatgtatgtgtgtatttacatgttctggaatgtactgataagactgtgaatyagagcccctaactgagttagatacagggaatgagcaatcttttctcagaattatttttcaaatgagtatattgtaacaacccccaaatactcagctgaatccttgtatatcatatccttactcatatcatatccttactgtgatatgaacataaaaagtagttaaacactgactcaatggattccagaccttgttatcaaaatcaaatttccagatttcagctaatattgaaaatactatcgctgatagtgaggtatcttccagtaaacactgaaaytatgaaccattaaaacaaatttt

SEQ ID NO: 93804 - DNA, 496 bp, Chicken  19866894412704_3
atgtactgataagactgtgaatyagagcccctaactgagttagatacagggaatgagcaatcttttctcagaattatttttcaaatgagtatattgtaacaacccccaaatactcagctgaatccttgtatatcatatccttactcatatcatatccttactgtgatatgaacataaaaagtagttaaacactgactcaatggattccagaccttgttatcaaaatcaaatttccagatttcagctaatattgaaaatactatcgctgatagtgaggtatcttccagtaaacactgaaaytatgaaccattaaaacaaattttgatggacraatgcagacataagaccctaacaaatacacactaacacaaaaaacaaagcaaagacatacagtatgacagcacagcactgctaccaaaccaagagggagcttacagtgtaacagattgcacaacacttagggaattaaattggctgtgaaatcatgttattcatt

SEQ ID NO: 93805 - DNA, 465 bp, Chicken  19866894412704_4
taactgagttagatacagggaatgagcaatcttttctcagaattatttttcaaatgagtatattgtaacaacccccaaatactcagctgaatccttgtatatcatatccttactcatatcatatccttactgtgatatgaacataaaaagtagttaaacactgactcaatggattccagaccttgttatcaaaatcaaatttccagatttcagctaatattgaaaatactatcgctgatagtgaggtatcttccagtaaacactgaaaytatgaaccattaaaacaaattttgatggacraatgcagacataagaccctaacaaatacacactaacacaaaaaacaaagcaaagacatacagtatgacagcacagcactgctaccaaaccaagagggagcttacagtgtaacagattgcacaacacttagggaattaaattggctgtgaaatcatgttattcatt

SEQ ID NO: 93806 - DNA, 599 bp, Chicken  19866894412708_1
  misc_feature (1)..(6): n is any nucleotide
nnnnnncaaaatctaagatatctgacctggaacatttgaaactaaaagttcccagtttagcaattactccttacctttattcctagaaatttgggttaaagacacacacttcaaataaacaaacaagcctgtaacatcaaacaacccaagaaaatttacagaatactctaagcataacacaacctaatccacaagagctagagcttttcttctgccattcattttctgaaacttcatgaaaaacatgcagatagaggcaccagaacagaaactcttgtttaatttgacacataaaacagwaatctaaactaaaagatttgttacacaaatcttatcataaacacctacataaaaagcactttagcaaacaaaaggtttaaggttaccttcacataatttatttaccattacttttgctaaagttgaaccatttgaagtgtgtacataaaacatgtccatttcagagacaataaaatggaatgttagtttccacggcaacctggcaagagtgggacacttctgggggttttatttgtttataacagatgggaaaatatcatratgctgtcctcaagcattgagttacttgtgttaagcct

SEQ ID NO: 93807 - DNA, 600 bp, Chicken  19866894412708_2
agaacagaaactcttgtttaatttgacacataaaacagwaatctaaactaaaagatttgttacacaaatcttatcataaacacctacataaaaagcactttagcaaacaaaaggtttaaggttaccttcacataatttatttaccattacttttgctaaagttgaaccatttgaagtgtgtacataaaacatgtccatttcagagacaataaaatggaatgttagtttccacggcaacctggcaagagtgggacacttctgggggttttatttgtttataacagatgggaaaatatcatratgctgtcctcaagcattgagttacttgtgttaagccttaaggcagaaatsagaaaactttttgtagttttatttttgaaaagcctagtactaattacaaccaacagaatctgaattagatgcgatcagatcaaacaaacctactgatacaactactgcacatcattcctttgttacttttaatgaaaagaattattaaaactgaaagttacagagccagtaacagtttcccaccattagcagaatttattttcacttagtgtagcatcagatatttaccttaaacagaagagtccaatt

SEQ ID NO: 93808 - DNA, 600 bp, Chicken  19866894412708_3
aagatttgttacacaaatcttatcataaacacctacataaaaagcactttagcaaacaaaaggtttaaggttaccttcacataatttatttaccattacttttgctaaagttgaaccatttgaagtgtgtacataaaacatgtccatttcagagacaataaaatggaatgttagtttccacggcaacctggcaagagtgggacacttctgggggttttatttgtttataacagatgggaaaatatcatratgctgtcctcaagcattgagttacttgtgttaagccttaaggcagaaatsagaaaactttttgtagttttatttttgaaaagcctagtactaattacaaccaacagaatctgaattagatgcgatcagatcaaacaaacctactgatacaactactgcacatcattcctttgttacttttaatgaaaagaattattaaaactgaaagttacagagccagtaacagtttcccaccattagcagaatttattttcacttagtgtagcatcagatatttaccttaaacagaagagtccaatttcaagcgtgagattctaggaagggattcaggatttaagcagtacagattct

SEQ ID NO: 93809 - DNA, 599 bp, Chicken  19866894412710_1
  misc_feature (1)..(53): n is any nucleotide
nnnnnnnnnnnnnnnnnnnnnnnnnnnnnnnnnnnnnnnnnnnnnnnnnnnnntggaagtattccccagacaaccatcaacctgacaaagagaacaaggcatctcctatgtgtgacactcaactcaactcataactgcattttcctgttgttgcttttgggggctcatacgaggtacttgcagcccacagaagagcaaagcagtggccacgggctgcaggcctggaggagaacccaggtccaggccagttgataaatgcttccacatgcagtgtggtgtgcgagcccccatctgtttccrtaaactatccaacttgtgtaatactccctctcccggggatatctcaacttccttcccccgtgcctggatttagcacaagaatgatcccagtggctctgatgaaaccacaggggaagctccactggttttccttgtgaaatcacacccagcctgagagacttcgaggccccakggccaggttagcttcctgccctctccaccctgaacctgcccaagggctacacagctcaggttcttccctgacaagaaaagcaggaaaagaaagaatcgtcagaggtcagaagttctgagaaaacact

SEQ ID NO: 93810 - DNA, 600 bp, Chicken  19866894412710_2
ggtacttgcagcccacagaagagcaaagcagtggccacgggctgcaggcctggaggagaacccaggtccaggccagttgataaatgcttccacatgcagtgtggtgtgcgagcccccatctgtttccrtaaactatccaacttgtgtaatactccctctcccggggatatctcaacttccttcccccgtgcctggatttagcacaagaatgatcccagtggctctgatgaaaccacaggggaagctccactggttttccttgtgaaatcacacccagcctgagagacttcgaggccccakggccaggttagcttcctgccctctccaccctgaacctgcccaagggctacacagctcaggttcttccctgacaagaaaagcaggaaaagaaagaatcgtcagaggtcagaagttctgagaaaacactggttcctgctttcattcttcttggaaaggagaagaggtctgtcacgcctgggagctccccatcctttgcactgcaggggcacccagcagaatgtagcacagggcagctgtgagacagagcgagcatccagcaaaaygagtacattttgcacacaggaagcattttggcatcaa

SEQ ID NO: 93811 - DNA, 600 bp, Chicken  19866894412710_3
gaaatcacacccagcctgagagacttcgaggccccakggccaggttagcttcctgccctctccaccctgaacctgcccaagggctacacagctcaggttcttccctgacaagaaaagcaggaaaagaaagaatcgtcagaggtcagaagttctgagaaaacactggttcctgctttcattcttcttggaaaggagaagaggtctgtcacgcctgggagctccccatcctttgcactgcaggggcacccagcagaatgtagcacagggcagctgtgagacagagcgagcatccagcaaaaygagtacattttgcacacaggaagcattttggcatcaagtttctattgcctggcctaggctgaaagcccacatttccctccygccctccctttgctggggccatctcattcttgtgcctctcattttggaggaggctggtatcaactggtggagagaccattccgtattagccaccagtgtgctcttcccacaaagaaggcaaatagtctcctggtctgcattaggcagagcacagcaagcaggctgagggaagggatcatttccctctgctcagcactgatgaggccacacttgctttgc

SEQ ID NO: 93812 - DNA, 600 bp, Chicken  19866894412710_4
ggctacacagctcaggttcttccctgacaagaaaagcaggaaaagaaagaatcgtcagaggtcagaagttctgagaaaacactggttcctgctttcattcttcttggaaaggagaagaggtctgtcacgcctgggagctccccatcctttgcactgcaggggcacccagcagaatgtagcacagggcagctgtgagacagagcgagcatccagcaaaaygagtacattttgcacacaggaagcattttggcatcaagtttctattgcctggcctaggctgaaagcccacatttccctccygccctccctttgctggggccatctcattcttgtgcctctcattttggaggaggctggtatcaactggtggagagaccattccgtattagccaccagtgtgctcttcccacaaagaaggcaaatagtctcctggtctgcattaggcagagcacagcaagcaggctgagggaagggatcatttccctctgctcagcactgatgaggccacacttgctttgctgggtccagctccgggctccacagagcaagagagatatggacatactggacagaccccagcaaagggccacaaagataatg

SEQ ID NO: 93813 - DNA, 600 bp, Chicken  19866894412710_5
ggccatctcattcttgtgcctctcattttggaggaggctggtatcaactggtggagagaccattccgtattagccaccagtgtgctcttcccacaaagaaggcaaatagtctcctggtctgcattaggcagagcacagcaagcaggctgagggaagggatcatttccctctgctcagcactgatgaggccacacttgctttgctgggtccagctccgggctccacagagcaagagagatatggacatactggacagaccccagcaaagggccacaaagataatgaaggtacgggacaacygtatgacaagaggctcagagagctggtactgttcagcttggaacagagaatacacaggggagatctcatcaatgtctatacatacctgaagggtgggcgcagagagaatggtgccrggctcttgtcaktggtgcagtggacacaaactggaacaaagggaagcactcctgtactctgcagatagatgaccatgcactgttgtgggttgtctagaggagtggtgaagtttcctccttggaggtcttcagaagctgtctagatgtggtcctgggcaacctgctcttagttgggttgggctac

SEQ ID NO: 93814 - DNA, 600 bp, Chicken  19866894412710_6
gtctgcattaggcagagcacagcaagcaggctgagggaagggatcatttccctctgctcagcactgatgaggccacacttgctttgctgggtccagctccgggctccacagagcaagagagatatggacatactggacagaccccagcaaagggccacaaagataatgaaggtacgggacaacygtatgacaagaggctcagagagctggtactgttcagcttggaacagagaatacacaggggagatctcatcaatgtctatacatacctgaagggtgggcgcagagagaatggtgccrggctcttgtcaktggtgcagtggacacaaactggaacaaagggaagcactcctgtactctgcagatagatgaccatgcactgttgtgggttgtctagaggagtggtgaagtttcctccttggaggtcttcagaagctgtctagatgtggtcctgggcaacctgctcttagttgggttgggctacatggcttccagaggtcccttctaacctcaactgtcctttgattctggaggaaaagtgcccttctacgagccagggtgtgttatctcagcaaggtcattctttagtctctgcagtat

SEQ ID NO: 93815 - DNA, 600 bp, Chicken  19866894412710_7
cagagcacagcaagcaggctgagggaagggatcatttccctctgctcagcactgatgaggccacacttgctttgctgggtccagctccgggctccacagagcaagagagatatggacatactggacagaccccagcaaagggccacaaagataatgaaggtacgggacaacygtatgacaagaggctcagagagctggtactgttcagcttggaacagagaatacacaggggagatctcatcaatgtctatacatacctgaagggtgggcgcagagagaatggtgccrggctcttgtcaktggtgcagtggacacaaactggaacaaagggaagcactcctgtactctgcagatagatgaccatgcactgttgtgggttgtctagaggagtggtgaagtttcctccttggaggtcttcagaagctgtctagatgtggtcctgggcaacctgctcttagttgggttgggctacatggcttccagaggtcccttctaacctcaactgtcctttgattctggaggaaaagtgcccttctacgagccagggtgtgttatctcagcaaggtcattctttagtctctgcagtatagactttacatg

SEQ ID NO: 93816 - DNA, 600 bp, Chicken  19866894412726_1
ttatctttggggaatgcttcaaagtgaaagatttttaatgtgatgttagaaaatagagggtttttttgtttgttttgtttgtttgtatgttttttgtagttgtacatacataatcctcattctggtactgtcaggaaactagctgttttcctgaaactaaacatatgcatatttttgaatgatttcttctattgctgataatggatgtattttagtgcattcaaacatgccaatgttcatgcaaatatttttgtataaaaaaaagagatatatgattcatgtgtcaagcatcttaactgrtgaggcagctgtcctggtctgtcacagtaaggtggtcatctccttaagaaatagttcccttgtaaaaccagctctgcactcatacttggggaaatttgtaatttacttggaatctatacttgcttttttcagtggctgctggaacaaaattttgtactacagtgtgcctttctaagtgatgtcctggtccaaggactgactatttcayaaaaatggggaaagaaattgattaagtggtctagtgatttgcgttgaattatgtcatttctattctgatcatcttattgaaactgaatcaag

SEQ ID NO: 93817 - DNA, 600 bp, Chicken  19866894412726_2
attttagtgcattcaaacatgccaatgttcatgcaaatatttttgtataaaaaaaagagatatatgattcatgtgtcaagcatcttaactgrtgaggcagctgtcctggtctgtcacagtaaggtggtcatctccttaagaaatagttcccttgtaaaaccagctctgcactcatacttggggaaatttgtaatttacttggaatctatacttgcttttttcagtggctgctggaacaaaattttgtactacagtgtgcctttctaagtgatgtcctggtccaaggactgactatttcayaaaaatggggaaagaaattgattaagtggtctagtgatttgcgttgaattatgtcatttctattctgatcatcttattgaaactgaatcaagaaaatccatgcaaaatgaaatgctacttaaacatattagctactgatctaaaatctatttcaattaacagattttgctttaaaaaaaaaaaaacatttttttgcacaccttgagtttagtttcatggaatgcatttattactgattcaatatcactaaaggaatagaaaggaatgtgacatattcagtagttcaaatcatgaatatat

SEQ ID NO: 93818 - DNA, 600 bp, Chicken  19866894412726_3
atttattctccagatcttcagaagatctgaactcattcctttcagacagagcatactacacttgtgtatttaaccacagttcttcccaaaccaggcagaatcatatattttctgcttcctttttttctgcttccttgtcttctttcagtaaaagccttaacagaccaataagtaagaatcaatgtttcttaaaatatgcgataagttctgtaaacaagaaagttttttataaccctttaaatgttatatttaaagatgttcaacaccaaatgagtcggttgttaaaatttttgataaaakgtggctaatttgtcatgtccacgtggcaatgtcatacagtctgggaaagatctggagctgtccagggtccatggttgaacatattgccagatgaatgtgattaggtaaaggatgtttgtaattaatatgaactctcacaaacccattgtggtgaactattagagtgtcatgagtctttccttcctgagaaacagtcacattccatgaggttttgttttcatgaggaaacaaaagaaaaaagaaagaaaaagaagggagggaaagggaagggaagggaagggaagggaagggaagggaagg

SEQ ID NO: 93819 - DNA, 600 bp, Chicken  19866894412733_1
ctgatagacaggaggaaacccaagagctccagctcaccctgtttcacccaagcagagacagacacgccgagtacagaagtccacagcactgcagtatggcggacagaagcaaacccggtccccatcaccaggttagaggtggggaaaaacagaaccagatttaaaaggctgctctgctccctgccctgattcagcagcggtttacccagctgcagcctgtttacatttctaacaaacttcatcctgaactccccgggtcagatattctaaggaaggaaaggaactttatttatcacgtarcagagagagggaccagggcaaactgcctgagccacagtgagactccagcactgagcacagccctggaatttctggatgcattttacagtacagattgagttgtttttttattattatttatttttattgctaatttacttaaaatgagtgctcttaagtgtaaaaatcccagaatcttccaccagatattctcaggtgctgagctagcagtcatgcttcttgctttaagtatgaagtaggaatgataccatctgcaaaagaattccgtgtggcaartcgaaaggaaaagcagtccacctt

SEQ ID NO: 93820 - DNA, 600 bp, Chicken  19866894412733_2
aaaggaactttatttatcacgtarcagagagagggaccagggcaaactgcctgagccacagtgagactccagcactgagcacagccctggaatttctggatgcattttacagtacagattgagttgtttttttattattatttatttttattgctaatttacttaaaatgagtgctcttaagtgtaaaaatcccagaatcttccaccagatattctcaggtgctgagctagcagtcatgcttcttgctttaagtatgaagtaggaatgataccatctgcaaaagaattccgtgtggcaartcgaaaggaaaagcagtccaccttccaacaagccctcactgcttctatgaataaatgcattaataagcaaagtgaataaaatgcaggagattggaactttttagcagcctcactgtgaacaacctgttagcagaccaacayttaagcctgagaaaacagccatatctaaaattgaaaccaaaacttgttcttagctttcttgcaagttaaagcagttataacacaggaaagctctaaaatgctgccccaagtcagatctgcacaaaactgctttgtttgcacatcgcggggattgaaagc

SEQ ID NO: 93821 - DNA, 600 bp, Chicken  19866894412733_3
ttatttttattgctaatttacttaaaatgagtgctcttaagtgtaaaaatcccagaatcttccaccagatattctcaggtgctgagctagcagtcatgcttcttgctttaagtatgaagtaggaatgataccatctgcaaaagaattccgtgtggcaartcgaaaggaaaagcagtccaccttccaacaagccctcactgcttctatgaataaatgcattaataagcaaagtgaataaaatgcaggagattggaactttttagcagcctcactgtgaacaacctgttagcagaccaacayttaagcctgagaaaacagccatatctaaaattgaaaccaaaacttgttcttagctttcttgcaagttaaagcagttataacacaggaaagctctaaaatgctgccccaagtcagatctgcacaaaactgctttgtttgcacatcgcggggattgaaagcagacattgcacatggcagagctcatcaggacccaactccacatccgagcactcagcataggaagtgcatcagctccttctcttggttaaggcgtttgagcagaaaatttctgctctgatgctgtcttcatatgtatctggt

SEQ ID NO: 93822 - DNA, 599 bp, Chicken  19866894412737_1
  misc_feature (1)..(155): n is any nucleotide
nnnnnnnnnnnnnnnnnnnnnnnnnnnnnnnnnnnnnnnnnnnnnnnnnnnnnnnnnnnnnnnnnnnnnnnnnnnnnnnnnnnnnnnnnnnnnnnnnnnnnnnnnnnnnnnnnnnnnnnnnnnnnnnnnnnnnnnnnnnnnnnnnnnnnnnnnnntgagattcccccaagtactttgcacagcagccatttctcttacttcaggcaaatactgttgtcatgcagcatgcagtttgtttcctcacattaaagagacgtgctgacttcagagaagggggtattgccaacagcataggccccrgcctttctcagaaagccatscgctactggctcctgcctgagtgggatccccttcaaacatacatcctttaatagaaaatggggtatatacaggcttcacaaactgcatatgtggactgagatactcaattatcaaacactattacttgaattgttatactcagaaccatytgtggcactactcagcacagaccagcactccccagccagcaggcccagcctgccggtcagcatcagcctcctcgtgctttccacacagagctggagcagcctggcacgcacagcttcacgctcctgagc

SEQ ID NO: 93823 - DNA, 599 bp, Chicken  19866894412737_2
  misc_feature (1)..(135): n is any nucleotide
nnnnnnnnnnnnnnnnnnnnnnnnnnnnnnnnnnnnnnnnnnnnnnnnnnnnnnnnnnnnnnnnnnnnnnnnnnnnnnnnnnnnnnnnnnnnnnnnnnnnnnnnnnnnnnnnnnnnnnnnnnnnnnnnnnnnnnntgagattcccccaagtactttgcacagcagccatttctcttacttcaggcaaatactgttgtcatgcagcatgcagtttgtttcctcacattaaagagacgtgctgacttcagagaagggggtattgccaacagcataggccccrgcctttctcagaaagccatscgctactggctcctgcctgagtgggatccccttcaaacatacatcctttaatagaaaatggggtatatacaggcttcacaaactgcatatgtggactgagatactcaattatcaaacactattacttgaattgttatactcagaaccatytgtggcactactcagcacagaccagcactccccagccagcaggcccagcctgccggtcagcatcagcctcctcgtgctttccacacagagctggagcagcctggcacgcacagcttcacgctcctgagcagaggtgtccccacttcccg

SEQ ID NO: 93824 - DNA, 600 bp, Chicken  19866894412737_3
tactttgcacagcagccatttctcttacttcaggcaaatactgttgtcatgcagcatgcagtttgtttcctcacattaaagagacgtgctgacttcagagaagggggtattgccaacagcataggccccrgcctttctcagaaagccatscgctactggctcctgcctgagtgggatccccttcaaacatacatcctttaatagaaaatggggtatatacaggcttcacaaactgcatatgtggactgagatactcaattatcaaacactattacttgaattgttatactcagaaccatytgtggcactactcagcacagaccagcactccccagccagcaggcccagcctgccggtcagcatcagcctcctcgtgctttccacacagagctggagcagcctggcacgcacagcttcacgctcctgagcagaggtgtccccacttcccgaagctcagcacgccacrctgtcaccatttcaccaycattccccttttcttcctgaagcaagaagcctgtggtgcttgggcagctctgcctctgccacttctctattccagagaaaccccttcccasatcacaccacctgggaggcaccaag

SEQ ID NO: 93825 - DNA, 600 bp, Chicken  19866894412737_4
ctgagtgggatccccttcaaacatacatcctttaatagaaaatggggtatatacaggcttcacaaactgcatatgtggactgagatactcaattatcaaacactattacttgaattgttatactcagaaccatytgtggcactactcagcacagaccagcactccccagccagcaggcccagcctgccggtcagcatcagcctcctcgtgctttccacacagagctggagcagcctggcacgcacagcttcacgctcctgagcagaggtgtccccacttcccgaagctcagcacgccacrctgtcaccatttcaccaycattccccttttcttcctgaagcaagaagcctgtggtgcttgggcagctctgcctctgccacttctctattccagagaaaccccttcccasatcacaccacctgggaggcaccaagtccatcaaagaatagttcaaaactgttagttactgtgagccaactacaaaacramagcatttggcacagcaggacagcctcctgtgacaaaactttccttcatgctcttggggagtcccaaggcctcaatcctgtgtgcttcaaggagccagaggtggcttcaata

SEQ ID NO: 93826 - DNA, 600 bp, Chicken  19866894412737_5
aaacatacatcctttaatagaaaatggggtatatacaggcttcacaaactgcatatgtggactgagatactcaattatcaaacactattacttgaattgttatactcagaaccatytgtggcactactcagcacagaccagcactccccagccagcaggcccagcctgccggtcagcatcagcctcctcgtgctttccacacagagctggagcagcctggcacgcacagcttcacgctcctgagcagaggtgtccccacttcccgaagctcagcacgccacrctgtcaccatttcaccaycattccccttttcttcctgaagcaagaagcctgtggtgcttgggcagctctgcctctgccacttctctattccagagaaaccccttcccasatcacaccacctgggaggcaccaagtccatcaaagaatagttcaaaactgttagttactgtgagccaactacaaaacramagcatttggcacagcaggacagcctcctgtgacaaaactttccttcatgctcttggggagtcccaaggcctcaatcctgtgtgcttcaaggagccagaggtggcttcaatattaatgaccaattgatct

SEQ ID NO: 93827 - DNA, 600 bp, Chicken  19866894412737_6
ttgaattgttatactcagaaccatytgtggcactactcagcacagaccagcactccccagccagcaggcccagcctgccggtcagcatcagcctcctcgtgctttccacacagagctggagcagcctggcacgcacagcttcacgctcctgagcagaggtgtccccacttcccgaagctcagcacgccacrctgtcaccatttcaccaycattccccttttcttcctgaagcaagaagcctgtggtgcttgggcagctctgcctctgccacttctctattccagagaaaccccttcccasatcacaccacctgggaggcaccaagtccatcaaagaatagttcaaaactgttagttactgtgagccaactacaaaacramagcatttggcacagcaggacagcctcctgtgacaaaactttccttcatgctcttggggagtcccaaggcctcaatcctgtgtgcttcaaggagccagaggtggcttcaatattaatgaccaattgatctgtgttatgaagtctgcgtttaaaaccaccccatacttgaaaagtactacataagtattgtttttattcaaactcactagggctgaggaagt

SEQ ID NO: 93828 - DNA, 600 bp, Chicken  19866894412737_7
cggtcagcatcagcctcctcgtgctttccacacagagctggagcagcctggcacgcacagcttcacgctcctgagcagaggtgtccccacttcccgaagctcagcacgccacrctgtcaccatttcaccaycattccccttttcttcctgaagcaagaagcctgtggtgcttgggcagctctgcctctgccacttctctattccagagaaaccccttcccasatcacaccacctgggaggcaccaagtccatcaaagaatagttcaaaactgttagttactgtgagccaactacaaaacramagcatttggcacagcaggacagcctcctgtgacaaaactttccttcatgctcttggggagtcccaaggcctcaatcctgtgtgcttcaaggagccagaggtggcttcaatattaatgaccaattgatctgtgttatgaagtctgcgtttaaaaccaccccatacttgaaaagtactacataagtattgtttttattcaaactcactagggctgaggaagtaaataaccatcaataattctgaaagtgacaattaaggcttaagtgatcaggcaggtatttacagcaaattgcatctgc

SEQ ID NO: 93829 - DNA, 600 bp, Chicken  19866894412737_8
gtcagcatcagcctcctcgtgctttccacacagagctggagcagcctggcacgcacagcttcacgctcctgagcagaggtgtccccacttcccgaagctcagcacgccacrctgtcaccatttcaccaycattccccttttcttcctgaagcaagaagcctgtggtgcttgggcagctctgcctctgccacttctctattccagagaaaccccttcccasatcacaccacctgggaggcaccaagtccatcaaagaatagttcaaaactgttagttactgtgagccaactacaaaacramagcatttggcacagcaggacagcctcctgtgacaaaactttccttcatgctcttggggagtcccaaggcctcaatcctgtgtgcttcaaggagccagaggtggcttcaatattaatgaccaattgatctgtgttatgaagtctgcgtttaaaaccaccccatacttgaaaagtactacataagtattgtttttattcaaactcactagggctgaggaagtaaataaccatcaataattctgaaagtgacaattaaggcttaagtgatcaggcaggtatttacagcaaattgcatctgcag

SEQ ID NO: 93830 - DNA, 600 bp, Chicken  19866894412749_1
ctggtgacagtattggacctgattaaggcttcttgcagccctctggggtgaaaattcactgaatatctaatggcattttagaaagcatcggcctttacagagcagatctttgaaatgtctttttagatgactgtaatgagttgggaatgtctgagttacagattgccacagaacaactgcccagtttgtgggattgcaatcattgtattcctttatttatgattaagttcttcttaattacttctgtattttctgttaaaatattgaacagaagttcgaaatggtgtttgtttcgttacratatgtatggagctttctgggcagctgtatcagtggcttcactttacagaacacctgtgatgtgtgtgccaaggaaggagtggggtttttaatcctgccaagtaccagcagtgttgctttaaaaacaaatgcattgctgctttatagaaggtattggccaaagaggacccagacagagtaagaggcgcttcaggcatcgctcagtaggatgggactgtagtgaagtaaaacgaggaggtgaggaagaaggtgctacgtcctcatttagatgagggaaatgtccacacttccaatgcattg

SEQ ID NO: 93831 - DNA, 594 bp, Chicken  19866894412756_1
gaggcacaaaggagccccaggagagctgagctggtaaaaataaactggaattcactcaaaatagctcagcagcaacatgcccaaaaaaggagggaggcagaaggaggcacgggagcggcccccagcaccgggcagtgcccggggtgcccaggccaagggaccaagtaaggaggctgagcgcagccccaagggaggttggcacggtggggatgagtgtgctggtgccacatgcccggttctgtgccccgttcccagtgctggtgccatatccagtgctcagcacccagtgccatgctcagyrcccrgtgccatgcccagtgcaggcaccatgcccagtgctgcgcccagtgccatgctcagtgctcggtgctctgctgcagtctccatgctggtgccgtgtccagcgctgttcccgatgctggtgccgtgcctggtgctatgcctgcttcccatcccactgccatgcccgcttcttggcgctgccgctgtgcccggtgctctgccatgcccacaccgcacatggtgccgtgcttggtgccgagccctgcgccatgctagtgcccggttcctggtgccggtgccgtgcccggtgtt

SEQ ID NO: 93832 - DNA, 593 bp, Chicken  19866894412756_2
aggcacaaaggagccccaggagagctgagctggtaaaaataaactggaattcactcaaaatagctcagcagcaacatgcccaaaaaaggagggaggcagaaggaggcacgggagcggcccccagcaccgggcagtgcccggggtgcccaggccaagggaccaagtaaggaggctgagcgcagccccaagggaggttggcacggtggggatgagtgtgctggtgccacatgcccggttctgtgccccgttcccagtgctggtgccatatccagtgctcagcacccagtgccatgctcagyrcccrgtgccatgcccagtgcaggcaccatgcccagtgctgcgcccagtgccatgctcagtgctcggtgctctgctgcagtctccatgctggtgccgtgtccagcgctgttcccgatgctggtgccgtgcctggtgctatgcctgcttcccatcccactgccatgcccgcttcttggcgctgccgctgtgcccggtgctctgccatgcccacaccgcacatggtgccgtgcttggtgccgagccctgcgccatgctagtgcccggttcctggtgccggtgccgtgcccggtgtt

SEQ ID NO: 93833 - DNA, 589 bp, Chicken  19866894412756_3
acaaaggagccccaggagagctgagctggtaaaaataaactggaattcactcaaaatagctcagcagcaacatgcccaaaaaaggagggaggcagaaggaggcacgggagcggcccccagcaccgggcagtgcccggggtgcccaggccaagggaccaagtaaggaggctgagcgcagccccaagggaggttggcacggtggggatgagtgtgctggtgccacatgcccggttctgtgccccgttcccagtgctggtgccatatccagtgctcagcacccagtgccatgctcagyrcccrgtgccatgcccagtgcaggcaccatgcccagtgctgcgcccagtgccatgctcagtgctcggtgctctgctgcagtctccatgctggtgccgtgtccagcgctgttcccgatgctggtgccgtgcctggtgctatgcctgcttcccatcccactgccatgcccgcttcttggcgctgccgctgtgcccggtgctctgccatgcccacaccgcacatggtgccgtgcttggtgccgagccctgcgccatgctagtgcccggttcctggtgccggtgccgtgcccggtgtt

SEQ ID NO: 93834 - DNA, 600 bp, Chicken  19866894412759_1
tcactcttttttgtctttccagtttccctcagtaacatcattgaaagtgtctgtctttattctcagcatcctggatggtgagtggcatctcttccttttcttccagtttccctgcttggattcctcaccatttccccacactttgtttcttggcctaaactcagccagccagtctcagttctgcacctcagtttctcatcagatgtctccctccatttcccttggcattattcgtgggttcttatctctccaaccatcattgtgtaaatcatatttcagcctccgcccaagcagcccagsctgccctcttagccaatctcttgctcacctggcttctgcccaacttccagtcartcttttcctctcttcagctcttagcaagctctctgtcaccctctttaatcttctttcatccctcagcctcctacttcttttgcacttaaactattttgggtggagtgctaaagagtgccattgcaggaacaggaagaaatacccagtattagttcwgctggtcagtgctggctcccagcagcagctcttccctgcactccttgttggaagcarttcaaccatttcatctgacataagaaaatttgc

SEQ ID NO: 93835 - DNA, 600 bp, Chicken  19866894412759_2
ctttattctcagcatcctggatggtgagtggcatctcttccttttcttccagtttccctgcttggattcctcaccatttccccacactttgtttcttggcctaaactcagccagccagtctcagttctgcacctcagtttctcatcagatgtctccctccatttcccttggcattattcgtgggttcttatctctccaaccatcattgtgtaaatcatatttcagcctccgcccaagcagcccagsctgccctcttagccaatctcttgctcacctggcttctgcccaacttccagtcartcttttcctctcttcagctcttagcaagctctctgtcaccctctttaatcttctttcatccctcagcctcctacttcttttgcacttaaactattttgggtggagtgctaaagagtgccattgcaggaacaggaagaaatacccagtattagttcwgctggtcagtgctggctcccagcagcagctcttccctgcactccttgttggaagcarttcaaccatttcatctgacataagaaaatttgcctaaaacaggctcataacctaaatgtaatgcctaaattgctaacatttttctgt

SEQ ID NO: 93836 - DNA, 600 bp, Chicken  19866894412759_3
ctccatttcccttggcattattcgtgggttcttatctctccaaccatcattgtgtaaatcatatttcagcctccgcccaagcagcccagsctgccctcttagccaatctcttgctcacctggcttctgcccaacttccagtcartcttttcctctcttcagctcttagcaagctctctgtcaccctctttaatcttctttcatccctcagcctcctacttcttttgcacttaaactattttgggtggagtgctaaagagtgccattgcaggaacaggaagaaatacccagtattagttcwgctggtcagtgctggctcccagcagcagctcttccctgcactccttgttggaagcarttcaaccatttcatctgacataagaaaatttgcctaaaacaggctcataacctaaatgtaatgcctaaattgctaacatttttctgtgctggaggggagagaggaaaacataatgcattctaaacatgtagtacttagccctgcttacaccagtgagggattaacaagtagaaacagtcaaaatgtactatacttgccaaccttactggaggctaaattactttcatctacatcttcagttca

SEQ ID NO: 93837 - DNA, 600 bp, Chicken  19866894412759_4
atcatatttcagcctccgcccaagcagcccagsctgccctcttagccaatctcttgctcacctggcttctgcccaacttccagtcartcttttcctctcttcagctcttagcaagctctctgtcaccctctttaatcttctttcatccctcagcctcctacttcttttgcacttaaactattttgggtggagtgctaaagagtgccattgcaggaacaggaagaaatacccagtattagttcwgctggtcagtgctggctcccagcagcagctcttccctgcactccttgttggaagcarttcaaccatttcatctgacataagaaaatttgcctaaaacaggctcataacctaaatgtaatgcctaaattgctaacatttttctgtgctggaggggagagaggaaaacataatgcattctaaacatgtagtacttagccctgcttacaccagtgagggattaacaagtagaaacagtcaaaatgtactatacttgccaaccttactggaggctaaattactttcatctacatcttcagttcatgtatttgagtcctatagtctatatttgtaagcaaacagtgaaaattgtgtgatact

SEQ ID NO: 93838 - DNA, 600 bp, Chicken  19866894412761_1
gagtactgagatggcttaaattcccagctgaagagagtgttgggtcaaaactgcagcattcagtgacaaaaaatgtcattttgattaccagttaatgttatcagtcaaagatggctagaatccaagcaatcatgtcaagtaaacaagacatgattaagccaaaggattcccagcttgtcagagttaaaagcttctaaaagcttgtaacttctaatattcttgattcttcagatgtggaaacaacttctgtgcaactcaccgctatgcagagactcacacctgcacctacgactataagartgcagggagaaggtatttacaggagaccaatcccgtcgttagtgcaccaaagcttcccaaaatctaatgtggttgtgctgcatgtggccattctgccattgaagagttgtctttcattgagagaagcacttgcttaaactgcaaaattttgccatgctccacatctgaggatttgccaagtatcaaaagcacacaaggatgcatcctattgaagaataatgtgaacactactgcagttacaacttttcttctttagtgaatgaaaagttactttttaaaaacttacactatgatttaact

SEQ ID NO: 93839 - DNA, 574 bp, Chicken  19866894412762_1
acttctctgtgccataagctagccacttcagccaaagcattgcctggtatttctgcagacctcagtgccttcctaacttctttaaagatcggagccattggagaagcaaagcacttgctcctggctccacaccctggcacccaaatggtagctgcacacatcgcaggcagctctcccatatgtagtatcaactactgcatttaattatacttattacactctgaaagcagctatttttaatcagatcaaaacaaaccaagttcctctaagtacctgtttacatctttacttgcacaaacrgtatgagctacagcatttcaaaccttccatctttcattcatgttcgaaagaacaagttacatgacaaaacaacacaaccctgacacacagtcagtaatttcacatagatattcagctgcttttgagatgaatgctttccccattatttctcatgtccagttactgttttgggtgcaaactgtgggggatgcgctctgtctcctcattgccaggggctctggagttcactcaatgaacccatgaggtttccagacgaagcacggtgtaggtaata

SEQ ID NO: 93840 - DNA, 600 bp, Chicken  19866894412764_1
aaggaaaatgggcctgatttgggcttaaaaatatgaattgatacctcaaaacaagactcctgagccagtcacttctgcttcttatacaccaggccatttaactgatttgtgaaaggtataattgctctgaatgcaacgtgcctggcataaaaagaaagacaaaacctcgttgcgtaagtgtgaaaatgggtacaaatgcagacctaactgaaaaaaacaaccaccaccaacaaaatagagatgctgtctttcaattatcttggatcaataagtgagtctgactatacactacaaaatagrtattcctgggcattctgtgatacagcaatttgtgcttgcttttcctttggtaataggtcttatctggtaaaaagtagggatgaacatattcaattagcctcctgaaatatagtgtcattgtttctttctcctacctttttatccatggacattttcccagtcatttttagttactgcctcctgtgtgcttgtgtagcagacatgctgactccttaattaaaattgcatgccaggaagtaagtaactgccagctgaatgcttgcctcctactgttgcattctgtcatctcagggatggttt

SEQ ID NO: 93841 - DNA, 600 bp, Chicken  19866894412769_1
aatagaaaacattatttcagtgtgagattgtgaatcacttttgctgcaccattaacaactgaaacacaaccaatctcaaatgttactggaagccttctcaaaatatcaacagggcaggaaaataagtttctaaaaagtctataactgtaatgctcactggactccactttcaggaacaccctctgccaaggactccaggaagccaagacttgtctttgacagctgttctgaggtacaagtgaaaaacatgcagctcttgtgctgttagttgactacacaagaggacctccagcagtgatrcttcaggttgtgatttcccgcattaatgcacatacactattaatcccacctactcagccatgctcaggttatttattatatacacttattaacacatkgaagcaatagtgcaagaaaatagatttgtcatttcttctttcactctgaaagtctgagagacacgggagcatggattaaaaaaatttattgaaaattgtccaaaatccagccacacaacttatccaatccactaaaacttctcattctgtatggtttaaaaagaaaatgcatctcaccaacaagttgaaatgtcaaacaact

SEQ ID NO: 93842 - DNA, 600 bp, Chicken  19866894412769_2
caaaatatcaacagggcaggaaaataagtttctaaaaagtctataactgtaatgctcactggactccactttcaggaacaccctctgccaaggactccaggaagccaagacttgtctttgacagctgttctgaggtacaagtgaaaaacatgcagctcttgtgctgttagttgactacacaagaggacctccagcagtgatrcttcaggttgtgatttcccgcattaatgcacatacactattaatcccacctactcagccatgctcaggttatttattatatacacttattaacacatkgaagcaatagtgcaagaaaatagatttgtcatttcttctttcactctgaaagtctgagagacacgggagcatggattaaaaaaatttattgaaaattgtccaaaatccagccacacaacttatccaatccactaaaacttctcattctgtatggtttaaaaagaaaatgcatctcaccaacaagttgaaatgtcaaacaactaaattagaaaaggtaaggcacttgagatgtgttaatgtagcaaaattgcataataacaacgttctactttgaatgacaaagctcttttcaagcttaaa

SEQ ID NO: 93843 - DNA, 600 bp, Chicken  19866894412773_1
tttgagccccaggggaactgcactctccaagtcacccatgcagaaagcctggcctcctgcccatgcagatttgctttgcagcactgaggctgttctaagagcagaaggctctcaggagtttgcagtttctgtttcatccttgtactggaggtcctgtctgtctttctcagtgttaaattacaccttcatgctcaccctgcttccatgggcctgtagccacaggctctgcagcttcagaagagcacaccatgtggtctccttcacaaatggagacccatagccctaggagagcctacaagycccactccccctaaggtgctccwtcctttcatagagaaatcagaaatgcttgggttttgatttggattggaacagcaccaaaagaactggacccaaaatcttccacaaaagaggactgcatttcaycatccattccaagatcaacagctgggagttagctgcggtcaccagtgctgtttgctggtggattcaccctgggaattatttctgaggaacagctccaagaaagacagggcagctcagagaggaagagctgtctgaaatggtgcagggaagaggatttttttttaataaccwctc

SEQ ID NO: 93844 - DNA, 600 bp, Chicken  19866894412773_2
tctccaagtcacccatgcagaaagcctggcctcctgcccatgcagatttgctttgcagcactgaggctgttctaagagcagaaggctctcaggagtttgcagtttctgtttcatccttgtactggaggtcctgtctgtctttctcagtgttaaattacaccttcatgctcaccctgcttccatgggcctgtagccacaggctctgcagcttcagaagagcacaccatgtggtctccttcacaaatggagacccatagccctaggagagcctacaagycccactccccctaaggtgctccwtcctttcatagagaaatcagaaatgcttgggttttgatttggattggaacagcaccaaaagaactggacccaaaatcttccacaaaagaggactgcatttcaycatccattccaagatcaacagctgggagttagctgcggtcaccagtgctgtttgctggtggattcaccctgggaattatttctgaggaacagctccaagaaagacagggcagctcagagaggaagagctgtctgaaatggtgcagggaagaggatttttttttaataaccwctcttytcaataaaaagaaaaagact

SEQ ID NO: 93845 - DNA, 600 bp, Chicken  19866894412773_3
ttctgtttcatccttgtactggaggtcctgtctgtctttctcagtgttaaattacaccttcatgctcaccctgcttccatgggcctgtagccacaggctctgcagcttcagaagagcacaccatgtggtctccttcacaaatggagacccatagccctaggagagcctacaagycccactccccctaaggtgctccwtcctttcatagagaaatcagaaatgcttgggttttgatttggattggaacagcaccaaaagaactggacccaaaatcttccacaaaagaggactgcatttcaycatccattccaagatcaacagctgggagttagctgcggtcaccagtgctgtttgctggtggattcaccctgggaattatttctgaggaacagctccaagaaagacagggcagctcagagaggaagagctgtctgaaatggtgcagggaagaggatttttttttaataaccwctcttytcaataaaaagaaaaagactttatttaagcaaacagctctgtatttgctaccaagtctccactgcatatgtaaccagagtataaaatacaagaactttagctccttcccacacaacctcccca

SEQ ID NO: 93846 - DNA, 600 bp, Chicken  19866894412773_4
agycccactccccctaaggtgctccwtcctttcatagagaaatcagaaatgcttgggttttgatttggattggaacagcaccaaaagaactggacccaaaatcttccacaaaagaggactgcatttcaycatccattccaagatcaacagctgggagttagctgcggtcaccagtgctgtttgctggtggattcaccctgggaattatttctgaggaacagctccaagaaagacagggcagctcagagaggaagagctgtctgaaatggtgcagggaagaggatttttttttaataaccwctcttytcaataaaaagaaaaagactttatttaagcaaacagctctgtatttgctaccaagtctccactgcatatgtaaccagagtataaaatacaagaactttagctccttcccacacaacctccccaagaacatcctccctcaaatttgaatgaattcaaactaggaatgcaagtcaagccaaatataatttcttggtatctgttccactcagtaagagaggttaatcctccttcctcccaagctattttctcctctaagcttcttatcaccttctacaccattcacaatatggagac

SEQ ID NO: 93847 - DNA, 600 bp, Chicken  19866894412773_5
actccccctaaggtgctccwtcctttcatagagaaatcagaaatgcttgggttttgatttggattggaacagcaccaaaagaactggacccaaaatcttccacaaaagaggactgcatttcaycatccattccaagatcaacagctgggagttagctgcggtcaccagtgctgtttgctggtggattcaccctgggaattatttctgaggaacagctccaagaaagacagggcagctcagagaggaagagctgtctgaaatggtgcagggaagaggatttttttttaataaccwctcttytcaataaaaagaaaaagactttatttaagcaaacagctctgtatttgctaccaagtctccactgcatatgtaaccagagtataaaatacaagaactttagctccttcccacacaacctccccaagaacatcctccctcaaatttgaatgaattcaaactaggaatgcaagtcaagccaaatataatttcttggtatctgttccactcagtaagagaggttaatcctccttcctcccaagctattttctcctctaagcttcttatcaccttctacaccattcacaatatggagacacagct

SEQ ID NO: 93848 - DNA, 600 bp, Chicken  19866894412774_1
gagacacgcaaacttatcctgttacactatgaaggtgcagggaaatatggtgggagaaagcagtggtaaagtctgaggtcacttcaaaaagtatcatcgaacagtcagagccatctgaggcaatctctgccctccgacccttttaattcaagtaacatggtgtataaaactgaaaaggaaaagaaaaacttgttgctattccctttgccattacgtaagtgtgaatatgcagttactgctttcctagagcagataagcaacaacttttcacagaaataaaaacacctatacagcaatttracaacatgagggtccaagagcagccccagagaattcaggttaggtaggaggcaagcatggagatgcaagggaacagccagaaccgaagagtggaaatccaaagccaagcttaagggcagcctcttctcccaagttgtgtgacacaagaagaaaagcaagacagcccatttcacttacagaccaaaactgcacaacttctggcaaaacactaagcaaaggtcacggtattaccatgattcagatgaaccttccctccctgtacctgctgagaatcactatttccaagaaagcaccttagga

SEQ ID NO: 93849 - DNA, 600 bp, Chicken  19866894412775_1
cccgctgggttgaatccccaagaaatgggctacagcagtccagatcagcaacttccagtgaggttggtgtggcagtcccaaaggccattcattattccctggggggcgtatgctgagctcgaaaccagtgctaccaatttgctcagagagatgggagcttctctttaaaaatacagtgcactgtcatgtaaggtctttcaaagaattctgtgtgaggtgtcctgacagttgtatgtctgattctgaaagaagctccaagtaagtcctatcacaaacttcctggaagcaaaagaacactgytggtgatctctcaccatcacaagtgctgacaagtgtctctgccagtgtttccaaggggacttttcaggaaacaccgcctagcactgcaacagcatcctctttaggcacctgggttctgtgaacataagtattttatcaaattgatactgtgtgaaatactttccagcagcagctgcagcccatgcagccctgttccagcacccctctgaaaccagccaatacaatattcttttcaaaagaaggaggaaaaggaaaaagagacggtggaaatgaggtgtctgcaggagctaggctccagta

SEQ ID NO: 93850 - DNA, 600 bp, Chicken  19866894412777_1
tagtggcacagtgatgcctttataccttgaatttttgtgtaatgaaatggttccagaaattgaaggacacttgttggagagcatgagttctgagcaggaatgttaatttatgaaaaagatgctgctggaaacttgttagctactgcttagcagtctttgaaatactgctttgccactaaagggtgtaattgatatgtatacagagatattttgtcagggtattttaagttcttggaacatgtgcacccagtttgaagcactcttcttggctgtttgccactttcctatccagatccaggmgaaagtgcttgtaattttgcaagtagatgtaaaactgcttaaaatctaagcaagatttgtaaatgtgagcttaccttgtttggaagtggctgggaagggaagacagcctgcacatagatgcaggcttttctgccrtgtttggcakgcagttcaagcaggatgaatggcaaaaagcaatcccatgcttgcttgtttgtttttatttacaggggaagcagcagaactcaaattgtacccaggagtgtcatcaagctgtaggcagaattaagtgccttctcttgctggagattaaaacagaca

SEQ ID NO: 93851 - DNA, 600 bp, Chicken  19866894412777_2
ttagctactgcttagcagtctttgaaatactgctttgccactaaagggtgtaattgatatgtatacagagatattttgtcagggtattttaagttcttggaacatgtgcacccagtttgaagcactcttcttggctgtttgccactttcctatccagatccaggmgaaagtgcttgtaattttgcaagtagatgtaaaactgcttaaaatctaagcaagatttgtaaatgtgagcttaccttgtttggaagtggctgggaagggaagacagcctgcacatagatgcaggcttttctgccrtgtttggcakgcagttcaagcaggatgaatggcaaaaagcaatcccatgcttgcttgtttgtttttatttacaggggaagcagcagaactcaaattgtacccaggagtgtcatcaagctgtaggcagaattaagtgccttctcttgctggagattaaaacagacatgttgagtggacagggaaagggagacgacaggttagctcttaaattaattatgcaatgattggtttctgatacttagggatagatatcacccagcacagaactttacagcaacaactgcagaagtgctctcttac

SEQ ID NO: 93852 - DNA, 600 bp, Chicken  19866894412777_3
cttagcagtctttgaaatactgctttgccactaaagggtgtaattgatatgtatacagagatattttgtcagggtattttaagttcttggaacatgtgcacccagtttgaagcactcttcttggctgtttgccactttcctatccagatccaggmgaaagtgcttgtaattttgcaagtagatgtaaaactgcttaaaatctaagcaagatttgtaaatgtgagcttaccttgtttggaagtggctgggaagggaagacagcctgcacatagatgcaggcttttctgccrtgtttggcakgcagttcaagcaggatgaatggcaaaaagcaatcccatgcttgcttgtttgtttttatttacaggggaagcagcagaactcaaattgtacccaggagtgtcatcaagctgtaggcagaattaagtgccttctcttgctggagattaaaacagacatgttgagtggacagggaaagggagacgacaggttagctcttaaattaattatgcaatgattggtttctgatacttagggatagatatcacccagcacagaactttacagcaacaactgcagaagtgctctcttacacgctagatc

SEQ ID NO: 93853 - DNA, 600 bp, Chicken  19866894412777_4
ctacccagctagcttagccatcttgcacacctcagtgccctaagacgtacagatgtgccctcaggcttatctctactctgatgggcctggaaaatagtcctcccataagctctgtcatactgctacctctaatgcccactggttggcttggcagctggtggcagtcaacccagggcagcatggagtacgtttagggcaagctgtagaagctgtccaagaggccagctgagatcatgtcaagatccctgctactgcaaagagcttgccaccagtctccaagccagctgtctgcagggtaaygtttcatatctccagaccacactgttatcatcgctgcatttgtaacatggaagagcccagagggcagagaatgcacttgtcagttggaggttacagcgtagttgggcgcatgatgctacaggaaccaacrtcagctgcaggagctcaggagtggtgctctaccaaactctgtgttgtatcctcatagagcagtgtggaagagcagtcactggatttggcagcagttccagcagtgctgttacccaggtgaggccagtacgagcctgatgcaggcagtttggttctccacagggyagagcc

SEQ ID NO: 93854 - DNA, 600 bp, Chicken  19866894412777_5
aatgcccactggttggcttggcagctggtggcagtcaacccagggcagcatggagtacgtttagggcaagctgtagaagctgtccaagaggccagctgagatcatgtcaagatccctgctactgcaaagagcttgccaccagtctccaagccagctgtctgcagggtaaygtttcatatctccagaccacactgttatcatcgctgcatttgtaacatggaagagcccagagggcagagaatgcacttgtcagttggaggttacagcgtagttgggcgcatgatgctacaggaaccaacrtcagctgcaggagctcaggagtggtgctctaccaaactctgtgttgtatcctcatagagcagtgtggaagagcagtcactggatttggcagcagttccagcagtgctgttacccaggtgaggccagtacgagcctgatgcaggcagtttggttctccacagggyagagcccatyctgcctccccttctgaaagcctttgttctgtttttagccatcttgtgtaaggaatatatcctctggggctcttccttagagcacgtaatcacagtgcaatatgacaaactcaacaccaggagagat

SEQ ID NO: 93855 - DNA, 600 bp, Chicken  19866894412777_6
ggtaaygtttcatatctccagaccacactgttatcatcgctgcatttgtaacatggaagagcccagagggcagagaatgcacttgtcagttggaggttacagcgtagttgggcgcatgatgctacaggaaccaacrtcagctgcaggagctcaggagtggtgctctaccaaactctgtgttgtatcctcatagagcagtgtggaagagcagtcactggatttggcagcagttccagcagtgctgttacccaggtgaggccagtacgagcctgatgcaggcagtttggttctccacagggyagagcccatyctgcctccccttctgaaagcctttgttctgtttttagccatcttgtgtaaggaatatatcctctggggctcttccttagagcacgtaatcacagtgcaatatgacaaactcaacaccaggagagatgagacccttttcttttgattaagttactaatttcagggtatgcgacggccaatttttgacttgggagggtttttcaggatgttcatttaaaatgtatcaccatcggaaaagtattatttgtgttaaaacgcatttaaaatatttctctgatggcagcaagacac

SEQ ID NO: 93856 - DNA, 600 bp, Chicken  19866894412777_7
catatctccagaccacactgttatcatcgctgcatttgtaacatggaagagcccagagggcagagaatgcacttgtcagttggaggttacagcgtagttgggcgcatgatgctacaggaaccaacrtcagctgcaggagctcaggagtggtgctctaccaaactctgtgttgtatcctcatagagcagtgtggaagagcagtcactggatttggcagcagttccagcagtgctgttacccaggtgaggccagtacgagcctgatgcaggcagtttggttctccacagggyagagcccatyctgcctccccttctgaaagcctttgttctgtttttagccatcttgtgtaaggaatatatcctctggggctcttccttagagcacgtaatcacagtgcaatatgacaaactcaacaccaggagagatgagacccttttcttttgattaagttactaatttcagggtatgcgacggccaatttttgacttgggagggtttttcaggatgttcatttaaaatgtatcaccatcggaaaagtattatttgtgttaaaacgcatttaaaatatttctctgatggcagcaagacactccagagtgt

SEQ ID NO: 93857 - DNA, 600 bp, Chicken  19866894412778_1
acaaataattcccagtagttactttcatttagtgatagtatggcattttcaagcaaagtaacaagtattctagtgacagctgtcctaacgttcacagttaaatactacagagacagtttttgtgccacaagattaacctctgacattctagtcaaaccaaccaaaagagaagtcttattttcaactgacagcttaaatactgcctgactccaagcccctgtcttcctgtacttgcttcttacacattacgtgccctaaaaattccaggtagccgacgaatgttcaaccacaatataaagygaagagcttgagttaaataaaaatgctcatttactattgttgtggtaatcaaactatagtttatgacatactaaaattaagggaaatgggaaatttccactgaagaattacagagatacctagtagctcaagacagaaatggggttgccaaaaatttctcatgagtatatgtaaaatgttctattctatgactctaaaagtaagcttaaatatttaagaactgaatggtttgcaaaaaatagtgtgtgctcacaacaacacacaaatgtgcatgcattcaaggtaatttgagagagaagt

SEQ ID NO: 93858 - DNA, 600 bp, Chicken  19866894412782_1
tgctgtttgaaacaactcttaaactgtgaattctgtgattcttttaactgtatgtgcttatatactaaaaagaagtgagaaatcctcttttcaagatgcagaaataaaattccatatatcactatttgaagtgacagaatggaaacagtagggagaaaaatgctaaggtcaaaaaaataaagaatatgcgttaaaattatatgaagtttatctttgtctagcatctattaatgtgctgaaatttggcatactaatcccccagaacataacatcccagttatgctactattgggtaccaaracaaactaccaaaatgaaagaaaacctaaagaatkaatcagtctcacagctacaggccttgaatagacacaaataaaatgaagggttggaagtgyttttttcttgtacgtgctggttaaattgatttacatctgtctacccctgaaactctgttttaaaactaatgactgtggcttcatgtagaatagttgatattctgacccacatcctaagggcctccttcrgtccttarcaaacagaaataaaaatgaccccaggatctagcagactccactaaggtgctgaatcaaagacaccttt

SEQ ID NO: 93859 - DNA, 600 bp, Chicken  19866894412782_2
tgattcttttaactgtatgtgcttatatactaaaaagaagtgagaaatcctcttttcaagatgcagaaataaaattccatatatcactatttgaagtgacagaatggaaacagtagggagaaaaatgctaaggtcaaaaaaataaagaatatgcgttaaaattatatgaagtttatctttgtctagcatctattaatgtgctgaaatttggcatactaatcccccagaacataacatcccagttatgctactattgggtaccaaracaaactaccaaaatgaaagaaaacctaaagaatkaatcagtctcacagctacaggccttgaatagacacaaataaaatgaagggttggaagtgyttttttcttgtacgtgctggttaaattgatttacatctgtctacccctgaaactctgttttaaaactaatgactgtggcttcatgtagaatagttgatattctgacccacatcctaagggcctccttcrgtccttarcaaacagaaataaaaatgaccccaggatctagcagactccactaaggtgctgaatcaaagacaccttttttgtccttttttttttttttttttaataagcatt

SEQ ID NO: 93860 - DNA, 600 bp, Chicken  19866894412782_3
atgcagaaataaaattccatatatcactatttgaagtgacagaatggaaacagtagggagaaaaatgctaaggtcaaaaaaataaagaatatgcgttaaaattatatgaagtttatctttgtctagcatctattaatgtgctgaaatttggcatactaatcccccagaacataacatcccagttatgctactattgggtaccaaracaaactaccaaaatgaaagaaaacctaaagaatkaatcagtctcacagctacaggccttgaatagacacaaataaaatgaagggttggaagtgyttttttcttgtacgtgctggttaaattgatttacatctgtctacccctgaaactctgttttaaaactaatgactgtggcttcatgtagaatagttgatattctgacccacatcctaagggcctccttcrgtccttarcaaacagaaataaaaatgaccccaggatctagcagactccactaaggtgctgaatcaaagacaccttttttgtccttttttttttttttttttaataagcattaaaaaaaaaamcgaaacatttgagatttttttttttcctttttcttttaataatgcttga

SEQ ID NO: 93861 - DNA, 600 bp, Chicken  19866894412782_4
tgcagaaataaaattccatatatcactatttgaagtgacagaatggaaacagtagggagaaaaatgctaaggtcaaaaaaataaagaatatgcgttaaaattatatgaagtttatctttgtctagcatctattaatgtgctgaaatttggcatactaatcccccagaacataacatcccagttatgctactattgggtaccaaracaaactaccaaaatgaaagaaaacctaaagaatkaatcagtctcacagctacaggccttgaatagacacaaataaaatgaagggttggaagtgyytttttcttgtacgtgctggttaaattgatttacatctgtctacccctgaaactctgttttaaaactaatgactgtggcttcatgtagaatagttgatattctgacccacatcctaagggcctccttcrgtccttarcaaacagaaataaaaatgaccccaggatctagcagactccactaaggtgctgaatcaaagacaccttttttgtccttttttttttttttttttaataagcattaaaaaaaaaamcgaaacatttgagatttttttttttcctttttcttttaataatgcttgag

SEQ ID NO: 93862 - DNA, 498 bp, Chicken  19866894412782_5
ctattaatgtgctgaaatttggcatactaatcccccagaacataacatcccagttatgctactattgggtaccaaracaaactaccaaaatgaaagaaaacctaaagaatkaatcagtctcacagctacaggccttgaatagacacaaataaaatgaagggttggaagtgyttttttcttgtacgtgctggttaaattgatttacatctgtctacccctgaaactctgttttaaaactaatgactgtggcttcatgtagaatagttgatattctgacccacatcctaagggcctccttcrgtccttarcaaacagaaataaaaatgaccccaggatctagcagactccactaaggtgctgaatcaaagacaccttttttgtccttttttttttttttttttaataagcattaaaaaaaaaamcgaaacatttgagatttttttttttcctttttcttttaataatgcttgagggcaaactgttcaatgttttcccttt

SEQ ID NO: 93863 - DNA, 490 bp, Chicken  19866894412782_6
gtgctgaaatttggcatactaatcccccagaacataacatcccagttatgctactattgggtaccaaracaaactaccaaaatgaaagaaaacctaaagaatkaatcagtctcacagctacaggccttgaatagacacaaataaaatgaagggttggaagtgyttttttcttgtacgtgctggttaaattgatttacatctgtctacccctgaaactctgttttaaaactaatgactgtggcttcatgtagaatagttgatattctgacccacatcctaagggcctccttcrgtccttarcaaacagaaataaaaatgaccccaggatctagcagactccactaaggtgctgaatcaaagacaccttttttgtccttttttttttttttttttaataagcattaaaaaaaaaamcgaaacatttgagatttttttttttcctttttcttttaataatgcttgagggcaaactgttcaatgttttcccttt

SEQ ID NO: 93864 - DNA, 376 bp, Chicken  19866894412782_7
cagctacaggccttgaatagacacaaataaaatgaagggttggaagtgyttttttcttgtacgtgctggttaaattgatttacatctgtctacccctgaaactctgttttaaaactaatgactgtggcttcatgtagaatagttgatattctgacccacatcctaagggcctccttcrgtccttarcaaacagaaataaaaatgaccccaggatctagcagactccactaaggtgctgaatcaaagacaccttttttgtccttttttttttttttttttaataagcattaaaaaaaaaamcgaaacatttgagatttttttttttcctttttcttttaataatgcttgagggcaaactgttcaatgttttcccttt

SEQ ID NO: 93865 - DNA, 600 bp, Chicken  19866894412786_1
tcattccaaaaactgtaaaagagttgacacacgctggagtttaaaataaggaataaaaaagaagaactccctggtttttcctgcttcagtttactttaactggggaccgtagtgcaaataaacaaaatgaactgcaaaagcaaatattctttccccaataaccctaacagcagttgcgttctcagggtttgcaaggaaaaggaatatctgttattagtccagctcacacagctgtaaagacatggacaggcttttggacatgcgagcaatttgttctgtatgaaatctggaaaggctgartgaattccctcctgccctcagtattttcaagggggtgtgaattttctacgttaataatttaaaagtattaggaacttttctaaatgcagagtgatttccatctgccaaatgtggcattggaagtagaaatttaggggggattctggagtgcagacagtacctgcaggaggtgaaggaggtgcggagtctgcactttggatcaagacacgggtttaaatcagcattatcagaataaaagggagcgatttgatttgagccagatgaggaatgcattgaccagactgagagaggactggcact

SEQ ID NO: 93866 - DNA, 374 bp, Chicken  19866894412786_2
gtgcggagtctgcactttggatcaagacacgggtttaaatcagcattatcagaataaaagggagcgatttgatttgagccagatgaggaatgcattgaccagactgagagaggactggcactgtaatagctagcttattctttaatatatccataatgtcttgaaatttttgttgcaaagtactcattggaggaggtgaggcatgagccatcatgagccttgtgctgtcttcatctaacctctctgtgcctcaccctgactcctgggagaacctcccagcccccagggctccagcagcaycctaaattctctgggaaacataggcagtggcagacaccattccctccccagcatacagcacatcaactcacagt

SEQ ID NO: 93867 - DNA, 600 bp, Chicken  19866894412801_1
aaattacacttccatagctttgtgtgctctgtgttactcagtgatacagagaattagtttattactggtggctcatgtcctgcaacacgagctccatttcacagcctatgcttgtcccagtaaatgttttgccttgatactgacaacatgattgtgcttcaattaagatcccctgggatgctgtccttaaagataaagatgttgaggagagctggctactcttcaaggatgccctcctgaaagcacaagaggtctccatccctctgaataagaaagtgggcagatgagataggaaacggscatggctcagcaaggacctgctgggaacactgagggcgaagaaaggtgtgtataagctctggaaacaagggcgtgtcacctgagaagagtacagggacaccgtccagacttgcagacgtgggatcaggaaagccaaggcgcaggtagaactgaacgtggcaagggatatgaaaaacaataagacattctacaggtaattggccagaagagacaggccaaaatgggtgtaccctctttagaaacttaaaaggagaactggcttcaacagacgaagagaagcctgaggtactggaatgagtt

SEQ ID NO: 93868 - DNA, 600 bp, Chicken  19866894412802_1
ttccctcattttgatgacaagattttgtgggctcaaaaacagcgtaagaaattcaagagagaaaaatctggcaggactactaaacatagaatacacaagtccccagaaaaccctacaaatttgccctagacttaactttttccctaatatttgctactggcttctgcctgtgatagcactgggcagttcttgtgacatgtcctggtaggacaattcttaactgtttccttgaaatcacaacagagacaagtacaatgagaactctacatgcatgaaagaatacttagacaaacctgtcastttaagttttggagtgattaactcaatgcaaaaactgcctccacttccaacaaggtgtagaggagagaagctggctaaagccaatataaattaattctcaacagttatttacattatgacatcaactgctgtatacccactgggaraagcaagcactttataacgagcaacaatagttgcagtctgtctgaggctggtaactcagcatcatttgttggaccatcttcaacaagattaattcctctagccccaaatacgtcttttaccagatgaagatgcactttaaatccaaaatggaag

SEQ ID NO: 93869 - DNA, 600 bp, Chicken  19866894412802_2
tccctcattttgatgacaagattttgtgggctcaaaaacagcgtaagaaattcaagagagaaaaatctggcaggactactaaacatagaatacacaagtccccagaaaaccctacaaatttgccctagacttaactttttccctaatatttgctactggcttctgcctgtgatagcactgggcagttcttgtgacatgtcctggtaggacaattcttaactgtttccttgaaatcacaacagagacaagtacaatgagaactctacatgcatgaaagaatacttagacaaacctgtcatsttaagttttggagtgattaactcaatgcaaaaactgcctccacttccaacaaggtgtagaggagagaagctggctaaagccaatataaattaattctcaacagttatttacattatgacatcaactgctgtatacccactgggaraagcaagcactttataacgagcaacaatagttgcagtctgtctgaggctggtaactcagcatcatttgttggaccatcttcaacaagattaattcctctagccccaaatacgtcttttaccagatgaagatgcactttaaatccaaaatggaagt

SEQ ID NO: 93870 - DNA, 600 bp, Chicken  19866894412802_3
atatttgctactggcttctgcctgtgatagcactgggcagttcttgtgacatgtcctggtaggacaattcttaactgtttccttgaaatcacaacagagacaagtacaatgagaactctacatgcatgaaagaatacttagacaaacctgtcattttaagttttggagtgattaactcaatgcaaaaactgcctccacttccaacaaggtgtagaggagagaagctggctaaagccaatataaattaattctcaacagttatttacattatgacatcaactgctgtatacccactgggaraagcaagcactttataacgagcaacaatagttgcagtctgtctgaggctggtaactcagcatcatttgttggaccatcttcaacaagattaattcctctagccccaaatacgtcttttaccagatgaagatgcactttaaatccaaaatggaagtgagattaaccagcaaatggcaggcataaattcttcttcccatctttcttcaatttccagtctaaagacaaattcattgcattcagtctaaggtataattgataaaatatgaaaaggtaatacagcatttacatgaaaatatgagg

SEQ ID NO: 93871 - DNA, 600 bp, Chicken  19866894412805_1
cagcacaactggccagcttcagccataaggggaaggaaaagccctgctttcttctcccattgaaataccgaagctacattttcctttcctgtgcaacaatcccattctgacgcacacaaagttcattgaataaatccccatactcatcagcatgtttccagaagagagattcactcctgaccttcttggtggcgacattgccattattgctttggaagcatggtcgctattttgaataccacatatggcaactactgcactcacatatccagtacagaaatcggactgatgcaggatttyagctattcagaggtcagatcatcctctcactctgttctattgatgcttcccttagccagtatgactagtaacttggtgctcacacatgcagagcagccccaaaagcagcagccagcatcactgctggtgcacaaacccacagacttctcagttatgtgagtgatcacattaaaacaagcgggygtcatcacgcacagcgcaggagattctaaatcttgatggcgtattccttccagccaatgaaggacatctgcaaattgccttctgtatagagacgcagaattgtgggagactgtattt

SEQ ID NO: 93872 - DNA, 600 bp, Chicken  19866894412805_2
tcttggtggcgacattgccattattgctttggaagcatggtcgctattttgaataccacatatggcaactactgcactcacatatccagtacagaaatcggactgatgcaggatttyagctattcagaggtcagatcatcctctcactctgttctattgatgcttcccttagccagtatgactagtaacttggtgctcacacatgcagagcagccccaaaagcagcagccagcatcactgctggtgcacaaacccacagacttctcagttatgtgagtgatcacattaaaacaagcgggygtcatcacgcacagcgcaggagattctaaatcttgatggcgtattccttccagccaatgaaggacatctgcaaattgccttctgtatagagacgcagaattgtgggagactgtatttaattgagatttttacacttgtaaacccaactcattcagttttgcctatcagcctaaccatggaaaagttaatgatgaagaaccccacacttccatttctttttcttcaagagaaaactcaactgtgatgtaaagactttcctgaaaacaacgtggctgttctgcgtacctgaacagacacttc

SEQ ID NO: 93873 - DNA, 600 bp, Chicken  19866894412807_1
cgattttgttacgttgatttaagtaatcaagacaactacagtaatgcctaatgtagcagaaaaatagtgcacagatcagacagcaatgttaaaggagaggaggaaaaggagaagaatatcacctggatgttattttggcagataactgaaaataagagctgcaaaaataaggtcagcagtggtacccttcaaagaattccttagctctaacatagcactaaagaaatatatgtaacaaacactttcagtctgcacttacagattacaggtctttagaatataccaatgtgaaatgaaatkcatttcttttaatatcatatcctttaaaatacttaatttggaaaatgaaaattcagctcattgtttcacygttagatcagctgattcattccaaacaagctgttggcagcctctgctctacacgacatgcagtctaaataaagaactgcaaaaaagagtccttgaattctacctaaaggcttattgaaagtcagatcctcagaagctcacartaaagcaagcagtattgaacaaaaacctgaagcatccttaattcactgcagcttaggaagattcagcacgtaacggacgttacaattg

SEQ ID NO: 93874 - DNA, 600 bp, Chicken  19866894412807_2
acagatcagacagcaatgttaaaggagaggaggaaaaggagaagaatatcacctggatgttattttggcagataactgaaaataagagctgcaaaaataaggtcagcagtggtacccttcaaagaattccttagctctaacatagcactaaagaaatatatgtaacaaacactttcagtctgcacttacagattacaggtctttagaatataccaatgtgaaatgaaatkcatttcttttaatatcatatcctttaaaatacttaatttggaaaatgaaaattcagctcattgtttcacygttagatcagctgattcattccaaacaagctgttggcagcctctgctctacacgacatgcagtctaaataaagaactgcaaaaaagagtccttgaattctacctaaaggcttattgaaagtcagatcctcagaagctcacartaaagcaagcagtattgaacaaaaacctgaagcatccttaattcactgcagcttaggaagattcagcacgtaacggacgttacaattgctattttaagatcacatttgtcaaaaagaaatggatgaagggaggaaaaaggatttggtaaatttacaac

SEQ ID NO: 93875 - DNA, 600 bp, Chicken  19866894412807_3
tagcactaaagaaatatatgtaacaaacactttcagtctgcacttacagattacaggtctttagaatataccaatgtgaaatgaaatkcatttcttttaatatcatatcctttaaaatacttaatttggaaaatgaaaattcagctcattgtttcacygttagatcagctgattcattccaaacaagctgttggcagcctctgctctacacgacatgcagtctaaataaagaactgcaaaaaagagtccttgaattctacctaaaggcttattgaaagtcagatcctcagaagctcacartaaagcaagcagtattgaacaaaaacctgaagcatccttaattcactgcagcttaggaagattcagcacgtaacggacgttacaattgctattttaagatcacatttgtcaaaaagaaatggatgaagggaggaaaaaggatttggtaaatttacaacaacaacaaaatgcctggacaacagcctcccaagctgcctggggaccacagtgcagcctggggtccagcagcaggcacaagatgaacacctgcttcctaaatcatagcaggtattccctcaacgcgaaatactgatctaggtt

SEQ ID NO: 93876 - DNA, 600 bp, Chicken  19866894412812_1
acttattaaaacccaaagcctattaaaggcctttgaattcagggtctttcatgttacaatgtgtctatttactgccttcagtaggcttgtaatatatttagcttgaagaggttaacaagcgtaccttgcagtgttacttttattttctgttctgtgacacttaacaaaatcccattatacaattaagtagtattataatgctaaaatgttaatttgttctgcattccgttaaaattgaatttttttttcttgtgcatcagcccatgagttttgtataaaacctataatttaagcactacrccatagaagtgccctaaattagtaaccttttgcctttggtaccttaattacatgtcattatttagtacttaaagagcaacctctagctattggttaaatatttgctagctaattagatttgtcatgttaaagaaaacagtagcccttgcctctgtcctaatttgaatgggacttcagagttttgagaaaatgtttttttccccatgctttcctggaggaaaaatgaactttttgcattttctgtgcattttttttgttttgttttgttgttttgtttcctatttagtgtgttgtcatgca

SEQ ID NO: 93877 - DNA, 600 bp, Chicken  19866894412818_1
ggaaattcaaagtcatttcccaagatggttcactttttgtcactgtcctgtcttatttaaatctaggtttgtatgaatatccctcttcaacaaacattcacttcaacaaatgcaatgaaagacttatgggaggaatttttggtggcttttttcccacctgctgtcagatcttttcttctctccttaccccgggcctcccaaagaatgaggagagtatcacaaatgacaagcaggaaaatcaccattaattgagagggtaggcacaatttttattcaaatctaaacaaaattccgagcccrtaggaaatacatttccaacgtccccttctattcgtgcaaatgttgtcaaagggctttggtgacatttccagcttgtgtcactctaaactaaaaacattatttttggcagccaaaatatgtgcaaggaatacttttcttagttctttgtcatgtcataattggacaaaaattactacaaggacgcttcaaatgggtaagcataagatttcattgaaaaatcagatatttttccatcagtatttagaaattgaaatgaaaaaagaaacctacagaaattagaagaaaaaaaaaaaagcaaaa

SEQ ID NO: 93878 - DNA, 600 bp, Chicken  19866894412819_1
taacataaagcaggcacagctggtctatcggccccaaagtccacctgggattcaatcatttactgagtgggcacacagcttcaaagtcccaggagaagggtacataggagctcaggaagaaatccagcattggtagagaggtgatgtgtgcctgcactgagcctcctctgggacacaccacgggaagggcagggatgctgacaccccaacagatcctacttggtgctggcatcatggctctgtcctgggcctttccaacgattgcagtggagctttcagatgcctggatcccagttgttraagattattattatcattattattagttttstttctttctgtccctcccaatccccaaataaataatgaaacagaggagcagcctctgcaacagggagtgagcagtaacagcaagttctcaggcaaaatccatagtgctgcagcaggagagcctcagtgggctgctggctgggacaagcacatcacagccagatgctctgtgcacctaaacccctttcgtagctgctgacttccaggtgcctctgttttcgccaccayggtgtcctgggtttcacccatgctaagctatctaagggcaaa

SEQ ID NO: 93879 - DNA, 600 bp, Chicken  19866894412819_2
ccccaaagtccacctgggattcaatcatttactgagtgggcacacagcttcaaagtcccaggagaagggtacataggagctcaggaagaaatccagcattggtagagaggtgatgtgtgcctgcactgagcctcctctgggacacaccacgggaagggcagggatgctgacaccccaacagatcctacttggtgctggcatcatggctctgtcctgggcctttccaacgattgcagtggagctttcagatgcctggatcccagttgttraagattattattatcattattattagttttstttctttctgtccctcccaatccccaaataaataatgaaacagaggagcagcctctgcaacagggagtgagcagtaacagcaagttctcaggcaaaatccatagtgctgcagcaggagagcctcagtgggctgctggctgggacaagcacatcacagccagatgctctgtgcacctaaacccctttcgtagctgctgacttccaggtgcctctgttttcgccaccayggtgtcctgggtttcacccatgctaagctatctaagggcaaacaccgtggtcagattctcccttggtctgaac

SEQ ID NO: 93880 - DNA, 600 bp, Chicken  19866894412819_3
cgattgcagtggagctttcagatgcctggatcccagttgttraagattattattatcattattattagttttstttctttctgtccctcccaatccccaaataaataatgaaacagaggagcagcctctgcaacagggagtgagcagtaacagcaagttctcaggcaaaatccatagtgctgcagcaggagagcctcagtgggctgctggctgggacaagcacatcacagccagatgctctgtgcacctaaacccctttcgtagctgctgacttccaggtgcctctgttttcgccaccayggtgtcctgggtttcacccatgctaagctatctaagggcaaacaccgtggtcagattctcccttggtctgaacggagcagcagtgccacagcacacgatgggcaacagatcacagggcatgagagcgatgcgacgtggaccttccagcagcatttaactcccaagagctgtgctctcccagtgcctacagctagtcctgagcaacagctttcttctgctcaaagtctttttttgatgagtttctccagtttccgtatccgggaggattcctgctcaggcgttggggcgctcagtgagagt

SEQ ID NO: 93881 - DNA, 600 bp, Chicken  19866894412823_1
ggagattctccctagccctcctcttgttgttcatgtatttatagaaatatttgttgttatcctttaccttagtggccaagttcagttctagctatgctttggcttttctaattttctctctgcacagcttcactacataactgtaatcatcataagtagctggcccactcttccagagaccataaactttccttttgcttttgagttccagccaaaggtctctggggatggtcagctcctgcacctttaaaattacttccttgaagtattcccagccttcctggcctcccatgccctccmatactacctcccaagagaccctctcaaccgtggtcctaaaaagactaaagtctgccctccggaagtccaaggtggcagttctgctgacttccctccgtggtycaacaaggatcaagaaatctagcatcttgtgatcactatgctccagacagcctccaacctgtacatccctcacaagaccttctctgttaacaagcagaaagtccaggattttgcttccccttgttggctccttcaccagctgtgtcaggaagttatctcccacacactctaggaacctctgggttgttcccagcagat

SEQ ID NO: 93882 - DNA, 575 bp, Chicken  19866894412823_2
cttttctaattttctctctgcacagcttcactacataactgtaatcatcataagtagctggcccactcttccagagaccataaactttccttttgcttttgagttccagccaaaggtctctggggatggtcagctcctgcacctttaaaattacttccttgaagtattcccagccttcctggcctcccatgccctccmatactacctcccaagagaccctctcaaccgtggtcctaaaaagactaaagtctgccctccggaagtccaaggtggcagttctgctgacttccctccgtggtycaacaaggatcaagaaatctagcatcttgtgatcactatgctccagacagcctccaacctgtacatccctcacaagaccttctctgttaacaagcagaaagtccaggattttgcttccccttgttggctccttcaccagctgtgtcaggaagttatctcccacacactctaggaacctctgggttgttcccagcagataggatgttccctatctgctgtattataaatccagcggacgctggggaaggttgaagtcccccacaagaacaaggggg

SEQ ID NO: 93883 - DNA, 600 bp, Chicken  19866894412828_1
ttaaaaggaaatgctaatgaggtgtttatacatagcttttaactaagcatctagccacagcttttggatgcagatgttatcgtacatgtatggagactcacacacataaacacttctgttaaaatttgttctcagtcttttccttgtgaaaaacaggattgttgatatatgtattcatctggttaacttagaaataagaatcaaaatgctgaactgcaaggctgtgctttctagaagtccaattaaaaatcttctaaaacttcttttcttaaaacaaaaacaaaacttatttacaatgayttttttttttaaagtaaaaggctgtgtatgaggaatgaatttttgtttggtgtgtgtagaaattcagaattcacataaaaactcagatgtgtatttctcaaaatgcagatctgaagaacaggttggtgtttgtcatcttttagaagattctcttgagtcctcttctgtaactcgcacctgaaatgacaataaattgaatagtaggttacrgaaacatttaaaggattatcccctttatcaatgaaatgtcacttagatggacccttcttgaaaatgtgtctcctaaaatcatgtctgtgt

SEQ ID NO: 93884 - DNA, 600 bp, Chicken  19866894412828_2
gaactgcaaggctgtgctttctagaagtccaattaaaaatcttctaaaacttcttttcttaaaacaaaaacaaaacttatttacaatgatttttttttttaaagtaaaaggctgtgtatgaggaatgaatttttgtttggtgtgtgtagaaattcagaattcacataaaaactcagatgtgtatttctcaaaatgcagatctgaagaacaggttggtgtttgtcatcttttagaagattctcttgagtcctcttctgtaactcgcacctgaaatgacaataaattgaatagtaggttacrgaaacatttaaaggattatcccctttatcaatgaaatgtcacttagatggacccttcttgaaaatgtgtctcctaaaatcatgtctgtgttctgtatgactctaatttcaagtgtgctttaacaccactatgcaaaagatggatttatttcctagtgtgcatggagattgatttattgcaaagctacacaagactgggtgctaagtagtattccacaaggctaacacactccaggattttcactatgctttttatatatatttttttaatgactgactactgctccaatacagcctccag

SEQ ID NO: 93885 - DNA, 536 bp, Chicken  19866894412833_1
agtccagaagaagccaccttattttgctcattaattccctgtcaagctgcctttagcatattaacctgataataactacaaaacataaataccagtttctttttttgacattaaatatgaaatgtacaaagtaaagcattgatcctgctccccctgacattagtggtatttctgcagtggactgcagcaggagcagggtcatatccagagtaaagcctcataatagatgatataaacagtgtgctaattaaaagccaggttcaacctaaaatctcttctagcaagtttacttaatattaratgaaatgaggccaaacaggatttcagcaagcatttccgttcatccagctcaaatctgcctctttagtctagagacattcctctttaaacaccaaatatttttaaacactgaatcttttaattatcttatctgcagcattaaaactccctaagttcttttccaacttgtcttgctggggcactatatgcaggaaccggataatggagctctgaaaggcagctggttctagatggca

SEQ ID NO: 93886 - DNA, 600 bp, Chicken  19866894412838_1
ctttcattctgtgcttctatgcttcctagcgtgttgtgtgtcagcctcccatgatgatagatcaacaccagagagagcaagaagtagaagctaatacctacagaagagcatctttatggcagatgaaagcatgaaaaaagattcaatgaaaaacagcagtgacaaacagagggaaaaatctgtaaagcttggtaaatatttgttatttactttgaggtcaccaaagatcacctacagactttttgagatatttttcttaactgcagtctcctcaggagtgtgtataatttgtttaagagraaaaaaaaaaaaaaaggtggaagtgtagctctgtgtgatggaggaatgcagtctttcagcaagttatattgtcgcagagaaggtcaaacaggtacacttcaatatctcaggctccaaagaaccacaagtgaataacagaagaaagtaattgcaaattcttctgtaaaacattgactgaagaaaatggggcgaacaactgacaactagcagtttatgtagaaattttatatgttagttcgcatcaacataatcacaaagtggctaggacttatacaggccagtgaaggaagagtttaacag

SEQ ID NO: 93887 - DNA, 600 bp, Chicken  19866894412838_2
tttcattctgtgcttctatgcttcctagcgtgttgtgtgtcagcctcccatgatgatagatcaacaccagagagagcaagaagtagaagctaatacctacagaagagcatctttatggcagatgaaagcatgaaaaaagattcaatgaaaaacagcagtgacaaacagagggaaaaatctgtaaagcttggtaaatatttgttatttactttgaggtcaccaaagatcacctacagactttttgagatatttttcttaactgcagtctcctcaggagtgtgtataatttgtttaagagaraaaaaaaaaaaaaaggtggaagtgtagctctgtgtgatggaggaatgcagtctttcagcaagttatattgtcgcagagaaggtcaaacaggtacacttcaatatctcaggctccaaagaaccacaagtgaataacagaagaaagtaattgcaaattcttctgtaaaacattgactgaagaaaatggggcgaacaactgacaactagcagtttatgtagaaattttatatgttagttcgcatcaacataatcacaaagtggctaggacttatacaggccagtgaaggaagagtttaacagg

SEQ ID NO: 93888 - DNA, 600 bp, Chicken  19866894412841_1
cccaatgcaaaggcaagcagataagaggacagtggttcacagcttgtgaagcactgcagtcctagcttgagcagctgatgctggtattatattcagagtgaaaaaggaaaatggggtatttctggggcttgtgttgatgccctgaaatctacagtagccattctggtccctgaggttggctaagaacataagtatctggaagctagaactggtagatcgtgttagcattttgatcagctctcattttttgccccatttactatatatctctgaacaggcaacaagaatgtgggagatgtygttttggtggtgagagaaatcttcatattttttcctatttgctacacttctacatgtgcttctgtggcaagtgaaaaaaaatgccaaaaacaacgatataaatagtagattaataatatctactagtaaaacaatatccattggtaacatgacatatcttctgaaggagcttctgaaggatcctgcatgggatcttcagccttcccttactcctgccatgggggaacaactaggggcaaagcatacttaatgcgggaaaccccagtgactgctccagatccaggccctgtgctgaagcat

SEQ ID NO: 93889 - DNA, 599 bp, Chicken  19866894412842_1
  misc_feature (1)..(218): n is any nucleotide
nnnnnnnnnnnnnnnnnnnnnnnnnnnnnnnnnnnnnnnnnnnnnnnnnnnnnnnnnnnnnnnnnnnnnnnnnnnnnnnnnnnnnnnnnnnnnnnnnnnnnnnnnnnnnnnnnnnnnnnnnnnnnnnnnnnnnnnnnnnnnnnnnnnnnnnnnnnnnnnnnnnnnnnnnnnnnnnnnnnnnnnnnnnnnnnnnnnnnnnnnnnnnnnnnnnnnnnnnnccttacctcttgctaagctaatgtcattatttcgttgctttcatgaaaagacttaattcttactttagctttaaaatagctyttttttctctattgaaaaactctcctatctcatgtactttctgtccaacagaagatttgaaacagtactttttacatatcaagaaaaatatcatccctgtttctcaatgctcagtaagaaaaatggccttgttaggaaggagtagtgactgtgtgatagatgatggagtttcagaggttgtttaatacacaaacttaacagtaaacaaattcagtaaataatgagtaattgatgtagagcatttttactggasacaagaagcatgaaaatcaagatgaatacattgcttcaatttcaca

SEQ ID NO: 93890 - DNA, 600 bp, Chicken  19866894412842_2
tgctttcatgaaaagacttaattcttactttagctttaaaatagctyttttttctctattgaaaaactctcctatctcatgtactttctgtccaacagaagatttgaaacagtactttttacatatcaagaaaaatatcatccctgtttctcaatgctcagtaagaaaaatggccttgttaggaaggagtagtgactgtgtgatagatgatggagtttcagaggttgtttaatacacaaacttaacagtaaacaaattcagtaaataatgagtaattgatgtagagcatttttactggasacaagaagcatgaaaatcaagatgaatacattgcttcaatttcacagacaatgtaaattagaaacaggctgcatacattgttttaactcagggaataaaatgttattattgtctaaaaactagatttattttcaataacgctcaaaccctgtttttcttcctgatagccatttccctgaaattttcaggagtagggagtagctatcttaaatataggcatttaattttgttactttgttggctgtgagacagcaaacaataacgttcttgctattaattgagagttagagaaaagatgca

SEQ ID NO: 93891 - DNA, 600 bp, Chicken  19866894412849_1
ttactgatttgtttactacataaagggttcatacttttaaatactttcagcaaatacaaagtgtgtgttgttcacttaaccaggctattgcaaagaactgaaactacagcatcagtccctactgatggagtaagatccctacaggactggagtaacacattacttgcagagaggtaatttttagggattaatatcacaggagcactgaagatctttcctcttttcactttcacttttgatgctttctgtctgaacagagttttctgattaagtttttaaagggtgtaatacaaagccagmacattacatcttttgaacaataaatctgctaaaataaagcactggttatatttataggttaaaccgtagacaaactataaagacaatgaaaaaaaaaaragagagagagagaraaaactagaggtagtgtttttagaggcaaatccatttaagaggctttcatttttctttgcttttggtgtaaccactgtgaatgtcaagataagagatcattagacctacatcaacatgtggcataagggctgctcttctgtagcacatcaagcatgcaataacccgaccgaaattcccacagaggtt

SEQ ID NO: 93892 - DNA, 600 bp, Chicken  19866894412849_2
gcaaagaactgaaactacagcatcagtccctactgatggagtaagatccctacaggactggagtaacacattacttgcagagaggtaatttttagggattaatatcacaggagcactgaagatctttcctcttttcactttcacttttgatgctttctgtctgaacagagttttctgattaagtttttaaagggtgtaatacaaagccagmacattacatcttttgaacaataaatctgctaaaataaagcactggttatatttataggttaaaccgtagacaaactataaagacaatgmaaaaaaaaaragagagagagagaraaaactagaggtagtgtttttagaggcaaatccatttaagaggctttcatttttctttgcttttggtgtaaccactgtgaatgtcaagataagagatcattagacctacatcaacatgtggcataagggctgctcttctgtagcacatcaagcatgcaataacccgaccgaaattcccacagaggttaaacaatagcctcctgtttgtagctgcctccggttcatttagtagaaaatgtataacccaagttttatcagattcagctataaagacga

SEQ ID NO: 93893 - DNA, 600 bp, Chicken  19866894412849_3
gaaactacagcatcagtccctactgatggagtaagatccctacaggactggagtaacacattacttgcagagaggtaatttttagggattaatatcacaggagcactgaagatctttcctcttttcactttcacttttgatgctttctgtctgaacagagttttctgattaagtttttaaagggtgtaatacaaagccagmacattacatcttttgaacaataaatctgctaaaataaagcactggttatatttataggttaaaccgtagacaaactataaagacaatgaaaaaaaaaaragagagagagagaraaaactagaggtagtgtttttagaggcaaatccatttaagaggctttcatttttctttgcttttggtgtaaccactgtgaatgtcaagataagagatcattagacctacatcaacatgtggcataagggctgctcttctgtagcacatcaagcatgcaataacccgaccgaaattcccacagaggttaaacaatagcctcctgtttgtagctgcctccggttcatttagtagaaaatgtataacccaagttttatcagattcagctataaagacgaggtgctcaat

SEQ ID NO: 93894 - DNA, 600 bp, Chicken  19866894412849_4
agtccctactgatggagtaagatccctacaggactggagtaacacattacttgcagagaggtaatttttagggattaatatcacaggagcactgaagatctttcctcttttcactttcacttttgatgctttctgtctgaacagagttttctgattaagtttttaaagggtgtaatacaaagccagmacattacatcttttgaacaataaatctgctaaaataaagcactggttatatttataggttaaaccgtagacaaactataaagacaatgaaaaaaaaaaragagagagagagaraaaactagaggtagtgtttttagaggcaaatccatttaagaggctttcatttttctttgcttttggtgtaaccactgtgaatgtcaagataagagatcattagacctacatcaacatgtggcataagggctgctcttctgtagcacatcaagcatgcaataacccgaccgaaattcccacagaggttaaacaatagcctcctgtttgtagctgcctccggttcatttagtagaaaatgtataacccaagttttatcagattcagctataaagacgaggtgctcaatatttcctgtgcaaa

SEQ ID NO: 93895 - DNA, 600 bp, Chicken  19866894412849_5
caacatgtggcataagggctgctcttctgtagcacatcaagcatgcaataacccgaccgaaattcccacagaggttaaacaatagcctcctgtttgtagctgcctccggttcatttagtagaaaatgtataacccaagttttatcagattcagctataaagacgaggtgctcaatatttcctgtgcaaagtagagttctttgatccattatcctgctaattaccaatgaggttgacctcttcctggatttaactgctcttgttcgttttcttctggctccctgtatttgcttaattagayacaactatgaatgctcccacagttcaagccatcctgaagcactctggcttgtttgtgcagatccttcaccctctgagcggagagtcagactcactcaaggacagaattcaaaggctagtgaagtgaaggggagaatataagtcaaatgaccaggccccagcatgtaaacaaaacccagtatgagtccatggagtgtgactggagccaggccaatttgtacctgcaggaaatttggcccagaagtttaccttctaattttcaattcattctagcatcatttgtgtaatgaaagtaagaaag

SEQ ID NO: 93896 - DNA, 599 bp, Chicken  19866894412872_1
  misc_feature (1)..(166): n is any nucleotide
nnnnnnnnnnnnnnnnnnnnnnnnnnnnnnnnnnnnnnnnnnnnnnnnnnnnnnnnnnnnnnnnnnnnnnnnnnnnnnnnnnnnnnnnnnnnnnnnnnnnnnnnnnnnnnnnnnnnnnnnnnnnnnnnnnnnnnnnnnnnnnnnnnnnnnnnnnnnnnnnnnnnnngagaaaaagaagtattcatttataacagtctgtgatttacattttttgttggcttttttttttttttttttttttttttgcgtatgtgtttcaagacaaatcttttccagactagcagtggttgagttattacmgctttaatcttttaaaatccctgagtaagcagatttctgtaggtgtgatggctggacccattggctttgctaagattactaacatgtttaaaaccaaatccttttttaagagtttctctggactgaatctagtagctggcagaagggatggaattttggtttccattccaatccttctaggttgtggctcacaaccccaaaatgcttctggaatggaggagagcccctgcagaggggctcccwtgcagctgggatgccccaaagccagtttttctctctgaaagaagaaattctgccaa

SEQ ID NO: 93897 - DNA, 600 bp, Chicken  19866894412872_2
ttgcgtatgtgtttcaagacaaatcttttccagactagcagtggttgagttattacmgctttaatcttttaaaatccctgagtaagcagatttctgtaggtgtgatggctggacccattggctttgctaagattactaacatgtttaaaaccaaatccttttttaagagtttctctggactgaatctagtagctggcagaagggatggaattttggtttccattccaatccttctaggttgtggctcacaaccccaaaatgcttctggaatggaggagagcccctgcagaggggctcccwtgcagctgggatgccccaaagccagtttttctctctgaaagaagaaattctgccaagtccacatggcagacaaggttttcccaggtgagtcacgtagagatggtagcaaaaggatttattcctgtgtttggatctgtgacttcggcgctctgcagcctacaatgatctctgatctctggggtctggcccagttttctgttgttttatgggacaccatacagcacccattacttcatagtccagatgtaattatgcccctcagaagtggcaggctcttccctttgatttctattatatcac

SEQ ID NO: 93898 - DNA, 600 bp, Chicken  19866894412887_1
tttctgctgctgcattttgtaactgctagtctgatctggcattgctacccatcataaagagaggttgcttctttcctgagtaatctcacagtgcttatttttataggtatactgaagacagtgatcctgcttctgaatgggagataagcaaaagacaaagacagagctgctggctttgaacttgcgtgacaagcttcagtgatgagggctgtagaggaagacagagctgtgccatgacatgtaggagagtgagcaatttagcaactatgctatgaatagtgaccttctcagtattaagcrtactgtgtgaggttgcagggatgaggcttaagacccaaactcaccacggtgacaaagtgatgctgaactcagcagcattgaagtatctaaatacctttgtagatatgaacaygaatgccttactgaatatgagttaacatgactggaaaagtgaagcattagcacagtagarcacgctctatctgaggttgtgtctccacttttcactgtaactgccattttgtgttatgagtagcacttgttgccagccttgccccaggcaaggttaaccaattgcattkcctctgatcttcccagctg

SEQ ID NO: 93899 - DNA, 600 bp, Chicken  19866894412887_2
tgaagacagtgatcctgcttctgaatgggagataagcaaaagacaaagacagagctgctggctttgaacttgcgtgacaagcttcagtgatgagggctgtagaggaagacagagctgtgccatgacatgtaggagagtgagcaatttagcaactatgctatgaatagtgaccttctcagtattaagcrtactgtgtgaggttgcagggatgaggcttaagacccaaactcaccacggtgacaaagtgatgctgaactcagcagcattgaagtatctaaatacctttgtagatatgaacaygaatgccttactgaatatgagttaacatgactggaaaagtgaagcattagcacagtagarcacgctctatctgaggttgtgtctccacttttcactgtaactgccattttgtgttatgagtagcacttgttgccagccttgccccaggcaaggttaaccaattgcattkcctctgatcttcccagctgcaaagagcagcaccatattttgctgcaggagcatcactgggaaactatggcacagcaacccagagccgctggctttgatgatccctcagtgtttggccaacagcttccatca

SEQ ID NO: 93900 - DNA, 600 bp, Chicken  19866894412887_3
gctttgaacttgcgtgacaagcttcagtgatgagggctgtagaggaagacagagctgtgccatgacatgtaggagagtgagcaatttagcaactatgctatgaatagtgaccttctcagtattaagcrtactgtgtgaggttgcagggatgaggcttaagacccaaactcaccacggtgacaaagtgatgctgaactcagcagcattgaagtatctaaatacctttgtagatatgaacaygaatgccttactgaatatgagttaacatgactggaaaagtgaagcattagcacagtagarcacgctctatctgaggttgtgtctccacttttcactgtaactgccattttgtgttatgagtagcacttgttgccagccttgccccaggcaaggttaaccaattgcattkcctctgatcttcccagctgcaaagagcagcaccatattttgctgcaggagcatcactgggaaactatggcacagcaacccagagccgctggctttgatgatccctcagtgtttggccaacagcttccatcaacagatttgcaacacaggggtgccaatgtggccggtgacctaagcgaacacatggcaaaa

SEQ ID NO: 93901 - DNA, 600 bp, Chicken  19866894412887_4
accttctcagtattaagcrtactgtgtgaggttgcagggatgaggcttaagacccaaactcaccacggtgacaaagtgatgctgaactcagcagcattgaagtatctaaatacctttgtagatatgaacaygaatgccttactgaatatgagttaacatgactggaaaagtgaagcattagcacagtagarcacgctctatctgaggttgtgtctccacttttcactgtaactgccattttgtgttatgagtagcacttgttgccagccttgccccaggcaaggttaaccaattgcattkcctctgatcttcccagctgcaaagagcagcaccatattttgctgcaggagcatcactgggaaactatggcacagcaacccagagccgctggctttgatgatccctcagtgtttggccaacagcttccatcaacagatttgcaacacaggggtgccaatgtggccggtgacctaagcgaacacatggcaaaatgctgaatagaacaggggagccaaaaattgccagctggaagcmgggtagtgagggagagacagcagcgggaggctgccaagccttaatgcccataaagctcagggtcat

SEQ ID NO: 93902 - DNA, 600 bp, Chicken  19866894412887_5
ccattttgtgttatgagtagcacttgttgccagccttgccccaggcaaggttaaccaattgcattkcctctgatcttcccagctgcaaagagcagcaccatattttgctgcaggagcatcactgggaaactatggcacagcaacccagagccgctggctttgatgatccctcagtgtttggccaacagcttccatcaacagatttgcaacacaggggtgccaatgtggccggtgacctaagcgaacacatggcaaaatgctgaatagaacaggggagccaaaaattgccagctggaagcmgggtagtgagggagagacagcagcgggaggctgccaagccttaatgcccataaagctcagggtcatggggaggggctgttgatactgatagtttctttcctctttcttcccttctttggtttctcatattttctagttcccaccctctgtaagagcaacgctggcagagctgccaggcctcatcacaccactggtcagattttgtatgaaacctggagggaagaagcaactgcagcagttttaccagcattttacctcgtttatgccaactgtggtgtgcaaatggcttgttttatgact

SEQ ID NO: 93903 - DNA, 600 bp, Chicken  19866894412888_1
cacatcaacaaagctatcttgactagtccaatgctttctttactcttttgctcagatttctgaaaaactttgaaatcaatcaagaccagagtgttctcagactactcaaaacactcatacccccacaccagtctgcataaagattcttgctttagactagccacattctttttggtgtatgggtaattcttttgccctgtttctacaggatcttgcacaatgaggttgtggtccaagtctgtgggttttgagtgctttagtaatacaaataatgttgtcaccacttaaaaataggtttaygaagtgtaagctggctaaccttatgagaatgaaagcaaagatactaacaagttaccactatcaccattattatttcaaagaatgattagcaagtaaaacattttcttaatgtcttcaaacagtgaactagggacagtatttgaagggaaacttataagtgctgggggaaaaaggacaattcagaaaaatctgaataattgacaaaccaggattcatacttgattctatatcaatagcrgkagacatgaaaaagcttgcggacaaagtactgtatttttgtcactgtagtggaaatgctaa

SEQ ID NO: 93904 - DNA, 600 bp, Chicken  19866894412888_2
ctgtgggttttgagtgctttagtaatacaaataatgttgtcaccacttaaaaataggtttaygaagtgtaagctggctaaccttatgagaatgaaagcaaagatactaacaagttaccactatcaccattattatttcaaagaatgattagcaagtaaaacattttcttaatgtcttcaaacagtgaactagggacagtatttgaagggaaacttataagtgctgggggaaaaaggacaattcagaaaaatctgaataattgacaaaccaggattcatacttgattctatatcaatagcrgkagacatgaaaaagcttgcggacaaagtactgtatttttgtcactgtagtggaaatgctaagttacagcctgaaacagtgattgagcacctggtgggaaggcagggtcaactcaggggagcttcaggtgcatgcaatgcatgcacctgagtgaccagaagaggtggagccagggtccaccccttcccagacctcatttaagtgttggcagtggaggcaagggtatcttgctggagattcttgtgtacttgaggccttctaagggtaagcagagttttttcttttatttctgtgtgcaga

SEQ ID NO: 93905 - DNA, 600 bp, Chicken  19866894412888_3
gtgggttttgagtgctttagtaatacaaataatgttgtcaccacttaaaaataggtttaygaagtgtaagctggctaaccttatgagaatgaaagcaaagatactaacaagttaccactatcaccattattatttcaaagaatgattagcaagtaaaacattttcttaatgtcttcaaacagtgaactagggacagtatttgaagggaaacttataagtgctgggggaaaaaggacaattcagaaaaatctgaataattgacaaaccaggattcatacttgattctatatcaatagcrgkagacatgaaaaagcttgcggacaaagtactgtatttttgtcactgtagtggaaatgctaagttacagcctgaaacagtgattgagcacctggtgggaaggcagggtcaactcaggggagcttcaggtgcatgcaatgcatgcacctgagtgaccagaagaggtggagccagggtccaccccttcccagacctcatttaagtgttggcagtggaggcaagggtatcttgctggagattcttgtgtacttgaggccttctaagggtaagcagagttttttcttttatttctgtgtgcagaaa

SEQ ID NO: 93906 - DNA, 600 bp, Chicken  19866894412890_1
tcgtgttagctgggatgctgctaagcagcacagagaaggaaaggagccgcccttctgtgcctcacggcctgccctgcctctcatctcctcctgcaggcccttataaagcttctccaagtactgaccacaacaacaagcttattgaacaaacaaaaaaggtgttttggagccacattaatgaatctttagcactatgtgggtaaaggtcaaggaaagcaaaaagttatggttcccatagaaatgctaatccaaccatactgtgtatcctctgcatttaatggtacgctgctgaaaagaaamagctttcctcctctgatgccaggaagggttttgaattagcaaagacactcgaccaccactccccactctttcattgttcagagaagtggatttacagatcaaattggattaagccaatcttagcatcattgcagcctccctaatacttcaggaagcagtgagggctctcaagcatgattacagactgaatgccatgtgcccaacctgaacggaggagagggacccaggcgtcagaatggggtgagtcaccgaaccacagtctgccctgatcccatgcttgggtgcagcagggatgtggca

SEQ ID NO: 93907 - DNA, 599 bp, Chicken  19866894412897_1
  misc_feature (1)..(195): n is any nucleotide
nnnnnnnnnnnnnnnnnnnnnnnnnnnnnnnnnnnnnnnnnnnnnnnnnnnnnnnnnnnnnnnnnnnnnnnnnnnnnnnnnnnnnnnnnnnnnnnnnnnnnnnnnnnnnnnnnnnnnnnnnnnnnnnnnnnnnnnnnnnnnnnnnnnnnnnnnnnnnnnnnnnnnnnnnnnnnnnnnnnnnnnnnnnnnnnnnnnagcctgttatcccaaacattgacaagtttagaaaagaacctgaggctggggagaaaaaagaaacaaacaaacacacacaaaaacacacacacgcataagcaaacyccaaaccaaccgaaccttgggaaaaaatctggtactttttaggagcctcagtaatggctgaaagttaaaactggcttgagcatctcaggtgatgcatctggctatgcataccctcctgcttttttgcagggatggctttcagcagtggccattacttggtaggtgtttgtccctttcatcctcgcctgctggaatgaccttagaaatggctcctgggatcactttgaacccttaaaagagggctggttatgggcagtaagtaaacctgctaagttcaatgccttgccttgacccttccc

SEQ ID NO: 93908 - DNA, 600 bp, Chicken  19866894412897_2
cctgcttttttgcagggatggctttcagcagtggccattacttggtaggtgtttgtccctttcatcctcgcctgctggaatgaccttagaaatggctcctgggatcactttgaacccttaaaagagggctggttatgggcagtaagtaaacctgctaagttcaatgccttgccttgacccttccctcagtagttcttctctctgagcacgttcagactctccctgcctgacgtgacatttttacaggtgtaaagatctcaggagcaccttgagtaactaatgggagcagcactatttccycacaccctgcctctcccctgcagtcatggctcaagagaaaggcacgtacctgtccatcacacgtacaccatgcctaatagaaaccaacccgtccaagggttgttcctgccgtgctgctgaggagtgtggttttttgccaacttattattttctgggcctatttacatgcaatttctgcttgactcactctgtatttttttttttgacatctcctttctgatggtccacaaagacagactggaacgagacctatggttctgtggagagaggctgccccatagccatcagaaaaggcagaga

SEQ ID NO: 93909 - DNA, 600 bp, Chicken  19866894412898_1
ttgtgggttatcagacttgccttcaaatatctaagacttttcttaggagcactatgataataggcaccagagttagtattaattacagcagaggagggtagctaactttgctagtgtactgcatgaagttgggagcaggtcacacatggctactacggtaagatccagcaaaatgagtctgtgtggggatttgaattgattagattaaaaaaaaaaaaaaaagcagaggaggttcagatgcagactgcccatgactgagttccatgccctttcccacccattccacagagcagtagtggratgtctgaaggagaagttgcttcagctcacacctgtcatcacaacctccttcaggatccccctgactattctctgggagtacgtactgaggcttcttactcttggccacatgcagattattataagtcacctgaaggagcagaagaattggctgctatggatgagtatcaggaaaggcagggagcagactggtcatgaactactgaatgcagctgtggtcatgttactttaaaataagagactgagttattaacatgttactattcacaagagaatttccaaaacactgaggggtatttt

SEQ ID NO: 93910 - DNA, 559 bp, Chicken  19866894412903_1
attagcatttattttgggcagatgggttgcgttccaataccacagctcaggactttttttctttcttccccaaaatgctgctaatattccatatagattagctgggatcagagctgacaccatctcactctacgatccttcccactacatctacaacagcagaattcataacacagagatcaaacagtttttaaggcccccaaagccttgcccagcacaaggcatggttggattaatgttttctatcaagaaagccagccaatttggccccatactcagcagtgctcgcagcacagctcrgtgccgccagggccgtggtccccgcggggctctgctgacagccatgtcccatccctgtggctgctgtgtgcctggcacagggtggtctggcagccagactgcagaactactggcaggagtggggggctggaagccacagtccgcctctcctcattttcccctgcactgttcaagctgtcaattcaattctccccccactaagtggcaccaatgcaccgcaaaccacaacgaaaacatctgtacagacggcttacaaata

SEQ ID NO: 93911 - DNA, 599 bp, Chicken  19866894412911_1
  misc_feature (1)..(154): n is any nucleotide
nnnnnnnnnnnnnnnnnnnnnnnnnnnnnnnnnnnnnnnnnnnnnnnnnnnnnnnnnnnnnnnnnnnnnnnnnnnnnnnnnnnnnnnnnnnnnnnnnnnnnnnnnnnnnnnnnnnnnnnnnnnnnnnnnnnnnnnnnnnnnnnnnnnnnnnnnnttcacctttttgtttttccccctacctgtcttccttactgtaatggaggaatacatcagccttgaaacttgccacaaaagagccaggtgcaaagtcccacatactgtgttagattttatttacgctgaagtgaaacactctatagygcctgtaacgcaacacatgtaggagccaatctgttatgaatccttattaccaaaaaataccacaggtctgctggrtagcattgcttagggaacttctctgaaatgctacacagtctgttctcagcttcactgccttcttgttttctctattctttctcccacttagttatgacagcctgaaactataaaaggtaattcactattaagctaagattaaatgtattgttcttcagaattttcaaaaagttttggtaatctactttctgcctctcctgtactagcaacattacaagtacaac

SEQ ID NO: 93912 - DNA, 600 bp, Chicken  19866894412911_10
tggtgctgccctgaatctggtacaggctgccccrctgttctgcagatacactggtcagctggaagctatcagttagcaagtctgagagccttgyttttggcctgtcgctgccctgtgcttagagaaactcattttggagccttcagccagcagaggagtagaatcagggcactgcttacagcttgggagagtggaagtaggaacagaattgacccttacctcaggattacagctgcccaggtttttgcttttcttcataaatcatctctctgttctttttttggtacacaaaagcacrgrcataaatgtgtggagcatggaagctgagcaacaccacacccaatatgaaaatctggagtttttggttcctaataactatctgaaagggtacacttttatttcttctttttaacttagaggtcattcttatatcagttaggctttgctttggggtttttggttttgtttccccctctcctcattcatctcctgactgttttgctagctcagtgatttcacagtttattttctggtgagaaagcaaagattcacaagtacaggccagaaatgaattagatagaaattatatgacagatattg

SEQ ID NO: 93913 - DNA, 599 bp, Chicken  19866894412911_2
  misc_feature (1)..(79): n is any nucleotide
nnnnnnnnnnnnnnnnnnnnnnnnnnnnnnnnnnnnnnnnnnnnnnnnnnnnnnnnnnnnnnnnnnnnnnnnnnnnnnnttcacctttttgtttttccccctacctgtcttccttactgtaatggaggaatacatcagccttgaaacttgccacaaaagagccaggtgcaaagtcccacatactgtgttagattttatttacgctgaagtgaaacactctatagygcctgtaacgcaacacatgtaggagccaatctgttatgaatccttattaccaaaaaataccacaggtctgctggrtagcattgcttagggaacttctctgaaatgctacacagtctgttctcagcttcactgccttcttgttttctctattctttctcccacttagttatgacagcctgaaactataaaaggtaattcactattaagctaagattaaatgtattgttcttcagaattttcaaaaagttttggtaatctactttctgcctctcctgtactagcaacattacaagtacaacagaaaatcttcacaatagcgtgcagccacacttgccatattatctacacatgatagattgtaaggcggccttttg

SEQ ID NO: 93914 - DNA, 600 bp, Chicken  19866894412911_3
tagcattgcttagggaacttctctgaaatgctacacagtctgttctcagcttcactgccttcttgttttctctattctttctcccacttagttatgacagcctgaaactataaaaggtaattcactattaagctaagattaaatgtattgttcttcagaattttcaaaaagttttggtaatctactttctgcctctcctgtactagcaacattacaagtacaacagaaaatcttcacaatagcgtgcagccacacttgccatattatctacacatgatagattgtaaggcggccttttgytgttttgccatctctgtctttctctctgctgccttaaagtcactagcttaaaaagatactaagctactgctggcaactgatttcaatacagaagaaaatgcctgattgctgcatctgtgaaaacttaatagagatgttgattagaaactgactgcaagtaaaagtaggacagctctcttttgactgttcctaaaaggaagggagaagtaaacaacaaccataaatagtggaaagtgaatcagctcagaggaactgattgcttyaaagaaaatatatcagagagagctttcatttgaaaat

SEQ ID NO: 93915 - DNA, 600 bp, Chicken  19866894412911_4
ttatctacacatgatagattgtaaggcggccttttgytgttttgccatctctgtctttctctctgctgccttaaagtcactagcttaaaaagatactaagctactgctggcaactgatttcaatacagaagaaaatgcctgattgctgcatctgtgaaaacttaatagagatgttgattagaaactgactgcaagtaaaagtaggacagctctcttttgactgttcctaaaaggaagggagaagtaaacaacaaccataaatagtggaaagtgaatcagctcagaggaactgattgcttyaaagaaaatatatcagagagagctttcatttgaaaatatgtaatttcttctacttcaaaatgacactaaaaacagttgactaaccttcatttgaacagaaaggtatgtggggtaccatatctctatcaaccagaagactcatgcatttttgataaaagcattgtacagagacaagctgttctcagttcacactgagaaggtcatgtctcaagatttgaaattttgggaattatagataacaggttaaaaataacatctaattacaagtgcatataccataatggcatttcagtttaaaga

SEQ ID NO: 93916 - DNA, 600 bp, Chicken  19866894412911_5
agacaaaatattaatttgctgtttaagaagctctctttctctgatcaagcctaatctaggcagaatacactctagccagcaaaattaaagtaacgcatactttaagacacacagcatgtttgatacatagaaggcaaagcactattagatttagactttgtgaatgacctgaagtgcaagttaaaagtaatttagatgataaacagtacagttactcaacactcaatatcaccagtaatcactttaaaaatcactctgcttccctgcacagttttctgagtaacagtatttgcttcttcycataactcaaattcctctgggagatggtgtcgttatagaaagcagtgattagcaacactgctaaagcaggcttgaagttctggaggagggagtagacacgaaaactgagcttgtgtgaaatggggattgtgcacatggtcaaacagaggctaaaataagtatacgttaaatgtggactgatgtataaaatgtctttagtttgtattcttaggcttgttaatgcagaagctaaaaggccaggatattaacatgtaaacatctgtcactctttgcagaaaatacttagcatcctcagaattt

SEQ ID NO: 93917 - DNA, 600 bp, Chicken  19866894412911_6
ctcaaattcctctgggagatggtgtcgttatagaaagcagtgattagcaacactgctaaagcaggcttgaagttctggaggagggagtagacacgaaaactgagcttgtgtgaaatggggattgtgcacatggtcaaacagaggctaaaataagtatacgttaaatgtggactgatgtataaaatgtctttagtttgtattcttaggcttgttaatgcagaagctaaaaggccaggatattaacatgtaaacatctgtcactctttgcagaaaatacttagcatcctcagaatttcaaawggtcagcctcttaactttctgtttatagagatgagtggaaattctcacttgctgaaatgtgactactccaacgacaacagcattttcctcaattcactttacagctcaagactgtaggtaaatcataatgatttgcctcatcttgctgttccacagggagtccctcagctgcggcagatcatacagcctggtgctgccctgaatctggtacaggctgccccrctgttctgcagatacactggtcagctggaagctatcagttagcaagtctgagagccttgyttttggcctgtcgctgcc

SEQ ID NO: 93918 - DNA, 600 bp, Chicken  19866894412911_7
gctaaaaggccaggatattaacatgtaaacatctgtcactctttgcagaaaatacttagcatcctcagaatttcaaawggtcagcctcttaactttctgtttatagagatgagtggaaattctcacttgctgaaatgtgactactccaacgacaacagcattttcctcaattcactttacagctcaagactgtaggtaaatcataatgatttgcctcatcttgctgttccacagggagtccctcagctgcggcagatcatacagcctggtgctgccctgaatctggtacaggctgccccrctgttctgcagatacactggtcagctggaagctatcagttagcaagtctgagagccttgyttttggcctgtcgctgccctgtgcttagagaaactcattttggagccttcagccagcagaggagtagaatcagggcactgcttacagcttgggagagtggaagtaggaacagaattgacccttacctcaggattacagctgcccaggtttttgcttttcttcataaatcatctctctgttctttttttggtacacaaaagcacrgrcataaatgtgtggagcatggaagctgagcaacac

SEQ ID NO: 93919 - DNA, 600 bp, Chicken  19866894412911_8
atcctcagaatttcaaawggtcagcctcttaactttctgtttatagagatgagtggaaattctcacttgctgaaatgtgactactccaacgacaacagcattttcctcaattcactttacagctcaagactgtaggtaaatcataatgatttgcctcatcttgctgttccacagggagtccctcagctgcggcagatcatacagcctggtgctgccctgaatctggtacaggctgccccrctgttctgcagatacactggtcagctggaagctatcagttagcaagtctgagagccttgyttttggcctgtcgctgccctgtgcttagagaaactcattttggagccttcagccagcagaggagtagaatcagggcactgcttacagcttgggagagtggaagtaggaacagaattgacccttacctcaggattacagctgcccaggtttttgcttttcttcataaatcatctctctgttctttttttggtacacaaaagcacrgrcataaatgtgtggagcatggaagctgagcaacaccacacccaatatgaaaatctggagtttttggttcctaataactatctgaaagggtacact

SEQ ID NO: 93920 - DNA, 600 bp, Chicken  19866894412911_9
cctggtgctgccctgaatctggtacaggctgccccrctgttctgcagatacactggtcagctggaagctatcagttagcaagtctgagagccttgyttttggcctgtcgctgccctgtgcttagagaaactcattttggagccttcagccagcagaggagtagaatcagggcactgcttacagcttgggagagtggaagtaggaacagaattgacccttacctcaggattacagctgcccaggtttttgcttttcttcataaatcatctctctgttctttttttggtacacaaaagcacrgrcataaatgtgtggagcatggaagctgagcaacaccacacccaatatgaaaatctggagtttttggttcctaataactatctgaaagggtacacttttatttcttctttttaacttagaggtcattcttatatcagttaggctttgctttggggtttttggttttgtttccccctctcctcattcatctcctgactgttttgctagctcagtgatttcacagtttattttctggtgagaaagcaaagattcacaagtacaggccagaaatgaattagatagaaattatatgacagatat

SEQ ID NO: 93921 - DNA, 599 bp, Chicken  19866894412916_1
  misc_feature (1)..(59): n is any nucleotide
nnnnnnnnnnnnnnnnnnnnnnnnnnnnnnnnnnnnnnnnnnnnnnnnnnnnnnnnnnnccaaagcaatcttccccctttccctgcctctgaactggaaaacatcacattgctggaggctgagagcagcttcccagttggcctcacactgtacagccctcccacatgatgaatgaaaagctatttttactccacagcttaaacaaaaagtaaatattttgtgaggtttatatactgtcagctatctctttcctcataaactaaaaaagaagttagaagtttccctcactgctcattttgkggctgtttttagctcaactgtatctggattttcagatatgtggctaaggacatttacaacagatacaaatttcattgttgggccataatttcatttgttttgccctgctttgatgttaaatgtaaagaagcctgrggctacttcatctaacataaggttgttagtgatgacgcctgctcagggaaggcagaaggctgtacatagcctaatctgtactctgtttatcagagctcctaaatgaaggaaggccccatttgcagggttayatactgatcctgataccatttgcacactgagta

SEQ ID NO: 93922 - DNA, 600 bp, Chicken  19866894412916_2
gttggcctcacactgtacagccctcccacatgatgaatgaaaagctatttttactccacagcttaaacaaaaagtaaatattttgtgaggtttatatactgtcagctatctctttcctcataaactaaaaaagaagttagaagtttccctcactgctcattttgkggctgtttttagctcaactgtatctggattttcagatatgtggctaaggacatttacaacagatacaaatttcattgttgggccataatttcatttgttttgccctgctttgatgttaaatgtaaagaagcctgrggctacttcatctaacataaggttgttagtgatgacgcctgctcagggaaggcagaaggctgtacatagcctaatctgtactctgtttatcagagctcctaaatgaaggaaggccccatttgcagggttayatactgatcctgataccatttgcacactgagtaggcctcaggatctccacgctcttcagatatttctgctcagggtgaaacaagagtgccttgttgcttctctgtcaattgtatttcctagcaaaaccaatggaggaatatagttgctatttcttttgactttaatgag

SEQ ID NO: 93923 - DNA, 600 bp, Chicken  19866894412916_3
agaagttagaagtttccctcactgctcattttgkggctgtttttagctcaactgtatctggattttcagatatgtggctaaggacatttacaacagatacaaatttcattgttgggccataatttcatttgttttgccctgctttgatgttaaatgtaaagaagcctgrggctacttcatctaacataaggttgttagtgatgacgcctgctcagggaaggcagaaggctgtacatagcctaatctgtactctgtttatcagagctcctaaatgaaggaaggccccatttgcagggttayatactgatcctgataccatttgcacactgagtaggcctcaggatctccacgctcttcagatatttctgctcagggtgaaacaagagtgccttgttgcttctctgtcaattgtatttcctagcaaaaccaatggaggaatatagttgctatttcttttgactttaatgagggtcttgcttatgaaggtagcaagaatagttttgatgttgattccccttgccatcacctttctctgggacaattctgaacttctttacaaaccctgcatgttccaaagtcatataaatatacaaagaagaa

SEQ ID NO: 93924 - DNA, 599 bp, Chicken  19866894412917_1
  misc_feature (1)..(148): n is any nucleotide
nnnnnnnnnnnnnnnnnnnnnnnnnnnnnnnnnnnnnnnnnnnnnnnnnnnnnnnnnnnnnnnnnnnnnnnnnnnnnnnnnnnnnnnnnnnnnnnnnnnnnnnnnnnnnnnnnnnnnnnnnnnnnnnnnnnnnnnnnnnnnnnnnnnnttatgcatatactcattggagaacatgtactttgttgtcaaatgtgcaagttaaagaagatgggtgagcttcagaaatcccggtcttacttctagctgtgccagattgctttgtgggaagtgagaattgatgctgcacagttacattggcartggagttgttcttacttcagtagmacagttgggaatactttatttgtatttcttgcttgtgtattgcaaatgcagtccagtggactgtgatgataccaatatagtggtgaaactcaaagaatgctggcacagaggtggtgatatatctgaggttcccaatgttggtcactatttctttattctaaratatacctttaaaaactggtatgtatgcaagtttgtgcatgtgtgggaaaataaagcatccaaggacagaaagtcaaataayttgagtagaattaatcctacccattgtttca

SEQ ID NO: 93925 - DNA, 599 bp, Chicken  19866894412917_2
  misc_feature (1)..(124): n is any nucleotide
nnnnnnnnnnnnnnnnnnnnnnnnnnnnnnnnnnnnnnnnnnnnnnnnnnnnnnnnnnnnnnnnnnnnnnnnnnnnnnnnnnnnnnnnnnnnnnnnnnnnnnnnnnnnnnnnnnnnnnnnnnnnttatgcatatactcattggagaacatgtactttgttgtcaaatgtgcaagttaaagaagatgggtgagcttcagaaatcccggtcttacttctagctgtgccagattgctttgtgggaagtgagaattgatgctgcacagttacattggcartggagttgttcttacttcagtagmacagttgggaatactttatttgtatttcttgcttgtgtattgcaaatgcagtccagtggactgtgatgataccaatatagtggtgaaactcaaagaatgctggcacagaggtggtgatatatctgaggttcccaatgttggtcactatttctttattctaaratatacctttaaaaactggtatgtatgcaagtttgtgcatgtgtgggaaaataaagcatccaaggacagaaagtcaaataayttgagtagaattaatcctacccattgtttcagtgcgtgggtcttacataactgaa

SEQ ID NO: 93926 - DNA, 600 bp, Chicken  19866894412917_3
caaatgtgcaagttaaagaagatgggtgagcttcagaaatcccggtcttacttctagctgtgccagattgctttgtgggaagtgagaattgatgctgcacagttacattggcartggagttgttcttacttcagtagmacagttgggaatactttatttgtatttcttgcttgtgtattgcaaatgcagtccagtggactgtgatgataccaatatagtggtgaaactcaaagaatgctggcacagaggtggtgatatatctgaggttcccaatgttggtcactatttctttattctaaratatacctttaaaaactggtatgtatgcaagtttgtgcatgtgtgggaaaataaagcatccaaggacagaaagtcaaataayttgagtagaattaatcctacccattgtttcagtgcgtgggtcttacataactgaactccttagtttgtmtaaatgaacctccaaaaaccagctcataccgtatgaaaatgggttaagttggtaactttctggctctctccctattttactggctctggggaaagctttggcaatgtgcattggatatataactcctagttgcctaaagctaaacaaga

SEQ ID NO: 93927 - DNA, 600 bp, Chicken  19866894412917_4
tgagaattgatgctgcacagttacattggcartggagttgttcttacttcagtagmacagttgggaatactttatttgtatttcttgcttgtgtattgcaaatgcagtccagtggactgtgatgataccaatatagtggtgaaactcaaagaatgctggcacagaggtggtgatatatctgaggttcccaatgttggtcactatttctttattctaaratatacctttaaaaactggtatgtatgcaagtttgtgcatgtgtgggaaaataaagcatccaaggacagaaagtcaaataayttgagtagaattaatcctacccattgtttcagtgcgtgggtcttacataactgaactccttagtttgtmtaaatgaacctccaaaaaccagctcataccgtatgaaaatgggttaagttggtaactttctggctctctccctattttactggctctggggaaagctttggcaatgtgcattggatatataactcctagttgcctaaagctaaacaagatcagctctaccttaggaattgtttgaggtttgctctagatgtatttagtctctttaaatacagaacatacttgttctcagtt

SEQ ID NO: 93928 - DNA, 600 bp, Chicken  19866894412917_5
ctttatttgtatttcttgcttgtgtattgcaaatgcagtccagtggactgtgatgataccaatatagtggtgaaactcaaagaatgctggcacagaggtggtgatatatctgaggttcccaatgttggtcactatttctttattctaaratatacctttaaaaactggtatgtatgcaagtttgtgcatgtgtgggaaaataaagcatccaaggacagaaagtcaaataayttgagtagaattaatcctacccattgtttcagtgcgtgggtcttacataactgaactccttagtttgtmtaaatgaacctccaaaaaccagctcataccgtatgaaaatgggttaagttggtaactttctggctctctccctattttactggctctggggaaagctttggcaatgtgcattggatatataactcctagttgcctaaagctaaacaagatcagctctaccttaggaattgtttgaggtttgctctagatgtatttagtctctttaaatacagaacatacttgttctcagtttaaatttagttttggagattgcagcttctattttggacctgaagaaaggcttcaggtttttgggttttt

SEQ ID NO: 93929 - DNA, 600 bp, Chicken  19866894412921_1
cctgcaggacttcacctgtccccgcagcaatctgtgcagacaacagcctgaccctgggagagagccacagatgccctgattctgggcctgaccctgcagcgcacacagggcctcagcaggcaggagagcagaggacacacagcatcccagcccatgagaagggaatgaatcactgaaaacagagccaggcacagaggcagggagggaagatgacagccctgcaaggcctccatctttaggagttgggttcatggtcagagccacatcgcccagcacaccccctgctccatggtgctcccrcagcccgatgtccctcggaggtccctgtgccgggacaccactccttctgccagctctggagctgtccaccacccccacctgcagcgaggatgggaaatagccctgtgcctctttggatccctgccctgccagaacccacagtgcaagaaagcagaccgtggcctggtttcccagtccgtgcaccttccagcaactcagatgccacaaatcagaagatcctgccaggaacgtcaccttcagaacctgcctcccggtgccccaactgaaccttcatgctgcaggaaccacaagttcagtgcg

SEQ ID NO: 93930 - DNA, 600 bp, Chicken  19866894412928_1
gacctgcttaagcctccgatcaccctaattaccgttattaggagcatctctgggtgcggggatggggacaccacgctgctgctctgcacgccggttcggggccggggtgcgcggggggagcggggtgggcacggctcgggctgtcagctcggctcagcccggctgtcaggcatggggacgtgcgggggctcatcgctctaattgacaccttcccctcgcaccccacgcgcggtcatcccagccttcctcctgccttcgtccctctgcttggctgtgtgtgggagcagtgtccagcccccrcagcccgtaacggggaagggagcctgsgcgttcatggcttgtatcrgagcagtgccggagagagagaggcatggagttgctgcggatggaggctgcttccaggagcacggtggcatccctcgggtgacagcgttgcgtgctgatgttctgaacacaggagcatcccgtgtgggttcccttgctcctgtccgaggcgccgcggaaatgcctcgtgtcagtgctccggggtcatttctgcccgtggaaggagcagagccctaaaacccgcaggatttctggtcacgccttgctgttctggag

SEQ ID NO: 93931 - DNA, 600 bp, Chicken  19866894412928_2
attaccgttattaggagcatctctgggtgcggggatggggacaccacgctgctgctctgcacgccggttcggggccggggtgcgcggggggagcggggtgggcacggctcgggctgtcagctcggctcagcccggctgtcaggcatggggacgtgcgggggctcatcgctctaattgacaccttcccctcgcaccccacgcgcggtcatcccagccttcctcctgccttcgtccctctgcttggctgtgtgtgggagcagtgtccagcccccrcagcccgtaacggggaagggagcctgsgcgttcatggcttgtatcrgagcagtgccggagagagagaggcatggagttgctgcggatggaggctgcttccaggagcacggtggcatccctcgggtgacagcgttgcgtgctgatgttctgaacacaggagcatcccgtgtgggttcccttgctcctgtccgaggcgccgcggaaatgcctcgtgtcagtgctccggggtcatttctgcccgtggaaggagcagagccctaaaacccgcaggatttctggtcacgccttgctgttctggaggcatctcagtgcacgagggctgcagag

SEQ ID NO: 93932 - DNA, 600 bp, Chicken  19866894412928_3
tctctgggtgcggggatggggacaccacgctgctgctctgcacgccggttcggggccggggtgcgcggggggagcggggtgggcacggctcgggctgtcagctcggctcagcccggctgtcaggcatggggacgtgcgggggctcatcgctctaattgacaccttcccctcgcaccccacgcgcggtcatcccagccttcctcctgccttcgtccctctgcttggctgtgtgtgggagcagtgtccagcccccrcagcccgtaacggggaagggagcctgsgcgttcatggcttgtatcrgagcagtgccggagagagagaggcatggagttgctgcggatggaggctgcttccaggagcacggtggcatccctcgggtgacagcgttgcgtgctgatgttctgaacacaggagcatcccgtgtgggttcccttgctcctgtccgaggcgccgcggaaatgcctcgtgtcagtgctccggggtcatttctgcccgtggaaggagcagagccctaaaacccgcaggatttctggtcacgccttgctgttctggaggcatctcagtgcacgagggctgcagagcgtgcaggggctgtgttgc

SEQ ID NO: 93933 - DNA, 600 bp, Chicken  19866894412928_4
gtcacctgtgtactgtgagccgagttcctcccaggcaatgcagagagatctctcattgagcctgctgtctttgtcatgtatttattttaaagtttgcccctttgatgtctgactttgcggcttgttttatgccagaaggctcggagcagcctgtgtaattagcccagaaaacaccgctttcatgtgggctgggggacccaagtggagaatgggttttgagggctttgttctgctgcggagaactgttgtttggtgtttgatgggtttcagcagagctctccttgcccttccctttttctmcttctgtgggttggagctcagcactctggcagtgaaagcacacatggtgagctgctgccctgtggggctgtttgctgctatactgtgttttctgatagccacgtgctgcccgttcccacctggcaagcgggcacagcccgacttccttccacagtggcagtgggatgagcagtgagggcccaaggatgcccccttgccatcccaaaaccagagccaaggcacagagctaccacgtgggcagaggtatcgccgccttcctcctttcacatccccacatatctttcgctaagaaacctcgtg

SEQ ID NO: 93934 - DNA, 600 bp, Chicken  19866894412929_1
gcacgctcggcttgtgctcatcaccctacatagcatgtctgtgcaggggggtggtggcggggagtcattgtgcactgaaaggtccatgtcctcactaaaagggctctgtgatcatctggcccccggccagccgcacagttcccattttgtgtggaaaatccactgatggaaatgcagtttgaccttgcctgctgtcagtgtctgattggagtgtgaaataaaaaaggcagttgttctcctgggctcagcagggtaggtgtgtgcctggcctggacgtggggctttgtcattctgttgcaraggtgccaaaaagagaggcaggtgctttgcctggtattggtgcagtcatccttgctgggagccctgcagtgtagaacaaactgggagtcgctccaaatgtggcagagattgatggggctccactgtacagatgaaatgtgtgggcacagcactgcygggcggctcagagctgccggacacttctttttttaagcattcttattggaaaggtttgtcagagcctttataatccaaaacttccttttgttttgatttcatttctgtgtcccagcatgaccaaatacccaataactgcctccc

SEQ ID NO: 93935 - DNA, 600 bp, Chicken  19866894412929_2
aatccactgatggaaatgcagtttgaccttgcctgctgtcagtgtctgattggagtgtgaaataaaaaaggcagttgttctcctgggctcagcagggtaggtgtgtgcctggcctggacgtggggctttgtcattctgttgcaraggtgccaaaaagagaggcaggtgctttgcctggtattggtgcagtcatccttgctgggagccctgcagtgtagaacaaactgggagtcgctccaaatgtggcagagattgatggggctccactgtacagatgaaatgtgtgggcacagcactgcygggcggctcagagctgccggacacttctttttttaagcattcttattggaaaggtttgtcagagcctttataatccaaaacttccttttgttttgatttcatttctgtgtcccagcatgaccaaatacccaataactgcctcccctgtcttattcattttgtttttcatccatccagatgtttgacatctatagaatgtgttacaaaagcagtcaaatctactccgaagggagcaaagagaaaattggccagtgccatattgtaagagctcatatacagcctgttagataacacctgtgt

SEQ ID NO: 93936 - DNA, 600 bp, Chicken  19866894412931_1
gccaactccacaagacaaaggcaaatacacaatggaactgtttgatggtaaaaccggacacaaaaagacagtggatctttctgggcaaggtaggctgttcacactgttaatattacctgaacgcgggtataacactgtggtggagtgggcacttactacagacctggtacctcttgggttgtagggtctctgcacgttgcctgtagcttggcatcctgagatagtgtcatccatttgcctcatgctgttctctcaacttataaattataatttactttttcctgttccaaataccagccygcagcttgactcagagttgcctacagagatgtcagctcagttcttgagttttcccacaaaaccccatgcatcgattggcaatgttaaacacaagytgtagcgttgaatgccttctctgtctcttcctttcaaataatatttggaagaggaagtgaaggataagtttgttctgttactttyttactgtatttctttgatggatataccagggctccttattcttcagagatgtcaagactggtccctttcatcagcacagtgaaggaatgtttcaggaacatataagattaatttgatggc

SEQ ID NO: 93937 - DNA, 554 bp, Chicken  19866894412931_2
tgttcacactgttaatattacctgaacgcgggtataacactgtggtggagtgggcacttactacagacctggtacctcttgggttgtagggtctctgcacgttgcctgtagcttggcatcctgagatagtgtcatccatttgcctcatgctgttctctcaacttataaattataatttactttttcctgttccaaataccagccygcagcttgactcagagttgcctacagagatgtcagctcagttcttgagttttcccacaaaaccccatgcatcgattggcaatgttaaacacaagytgtagcgttgaatgccttctctgtctcttcctttcaaataatatttggaagaggaagtgaaggataagtttgttctgttactttyttactgtatttctttgatggatataccagggctccttattcttcagagatgtcaagactggtccctttcatcagcacagtgaaggaatgtttcaggaacatataagattaatttgatggctgacggaagctcttactctagagacctctcacatcccagggagcagatt

SEQ ID NO: 93938 - DNA, 469 bp, Chicken  19866894412931_3
gtagggtctctgcacgttgcctgtagcttggcatcctgagatagtgtcatccatttgcctcatgctgttctctcaacttataaattataatttactttttcctgttccaaataccagccygcagcttgactcagagttgcctacagagatgtcagctcagttcttgagttttcccacaaaaccccatgcatcgattggcaatgttaaacacaagytgtagcgttgaatgccttctctgtctcttcctttcaaataatatttggaagaggaagtgaaggataagtttgttctgttactttyttactgtatttctttgatggatataccagggctccttattcttcagagatgtcaagactggtccctttcatcagcacagtgaaggaatgtttcaggaacatataagattaatttgatggctgacggaagctcttactctagagacctctcacatcccagggagcagatt

SEQ ID NO: 93939 - DNA, 600 bp, Chicken  19866894412933_1
caagctccgatagtccttacagtcaaatacttaaagtgacttaagcgcttaaaagaccgagtgtcttcagggaagaccaagactggaacttgtacgttagcactttgaggaaggagtttcactatgattaaaggaaatttgtttctagctctcagttgttctgattcgggaagaaaacacctgtcttggacttgagaggataaatgatgcaagcaattatatttcctggtcatgttaaataaaaaacaaaatatatcaaatgatcctggtgaaacagaaatatttataatactatagtcwtaatttgtttaggttggatgtcaggaggaagttctttactatgagagtggtgagatgctggaataggctgcccagagaggttgtggataccccatccctggaggtgccaggttagatggggtcctgggcagcatggtctagtattaaatgtggaggttggtggccctgcctgtggcagcagtgttggagattcatgatccttaagatccctttcaacccaggccaatctgtttaaaatatttttgagagggaaataaatgtagtgatgtgattttgctttttaaaaagaaatctggaagg

SEQ ID NO: 93940 - DNA, 600 bp, Chicken  19866894412941_1
ttttcatgaacacatttctcttgcagaaggctatcaataggttccttcctgaggcagccaggtttgaacctttgaaaggttcatcatttggtgctgtaggatgtatatgtgaaaccacctccatccagatcttgtgaagcattctgcaaactgttgagcctgaagctgctgctcttgctgtcatgctggggcagagaactgccagcaaggcgtgcagcagcactcctctgctagctggctgagatcaggagtgctgacatgctgccaggggcctgatccccttacgttttggtttgcttrtgttttggccagtggcacagggttattaacttccccttggacaagaaccagtgatgagcaatgcagtccttagttcaaccgtttttccaggcaatgttttgggcagctttactcgataattctgacagcagcaccctgttagcctcctgtcatgcagaacacaaggaagcacctattggaagaaagaaacagcctttgaaaaatagggcacatggtgcacctgatggtgcttgcgttgtatttctcttctgtaggtctgtcatgctgcaggtggtttccccatcacctcatctccagatc

SEQ ID NO: 93941 - DNA, 600 bp, Chicken  19866894412943_1
ctcagtttacttcatgaatattttcttttgagtttgtgtggtattggcatttgggaaaaaccccactgagaagctgtttctttcagagcctgattaccagtggaagtctgattccaaaatagtgtgtgtgtatttgtccaattcttttattgtggctaaagtgctccaattactgagcctccttcaattcatccaaacatttgaggaaagaaagagaactctgtttttaaacaaatgcaaaatcttaacaatttgaatccagttataaaacaacagacaatattttgattcaaacattawtattcagaaaaagatagcagtgtagcgaatttgaatgcctttctatagataagctttcaattgtttggccctcagtaccagttttattagggttagtgtgaattctcttgactttgaagagaagttacaagttaaaaagtcttcttcaggcaccacacagcacttcatattcactgcttagccatttctattgtcagtgatatacagtgttgtgtatatccagcaggcagctaaaccccatatagcagtttgctcacacctcaccagtgggatgggtgagaaattgagatgaaatgaaga

SEQ ID NO: 93942 - DNA, 600 bp, Chicken  19866894412943_2
atgaagcagagaattatcatagagtcacagactggttgaggtaggaagatgtttctggtgttctagtacaagcatttggtcaaggcatggtcagcagatgaggttaccaaggttacgcctaccccagttttcaatgtatctaagtacggagattctataacctctctgggcaacctcactgcaaaaacatttcctcttagctttaaatagaatttattgtacttcaattcatgcccacactgaagtgctatattttagaattaatgatccagaagtcagaaattcaactcagaggtgacstgtattagtagaacaaactctgtagatctatcttgctaactgtgctagtgagagacaaagttcagtataaaatccagacttcttttaaagctatacatcagtaactgaataaaagaaaaaaaatatacatcttctaccagatttttgaagttacatacatgaaacaggttgaacatctcatcactaattcaaatgtaagctgggagacaaagctaaagcttcatttctgaaagctcttctgttgagtattaggtacacgagtagctgcagagctcatgtaaatttgcagcatcaagtgtt

SEQ ID NO: 93943 - DNA, 599 bp, Chicken  19866894412956_1
  misc_feature (1)..(21): n is any nucleotide
nnnnnnnnnnnnnnnnnnnnncctgtgcccccctgggaagggaggagagggccgggcacagccccacacagcgctgtgccacctaaggaaggagaaggaggcgctgccagcggctctcgggccgccccaacccacagctgaaatgagatcaaagctgtcccgctccaggtaccaccagcaccgcgtctgtgccagcggtgaccgcagcgctgccgcccgcagtgcccggcgctttgctctctgaagcacgtcggcattctcctggcacagcggagcgcccaccgcccggcacagtgcccrcagccgcggccccgcgcaggtggagcactccagaggccccaccgcgtcccacggagacgatgacggcaccgcgaaggcagcagagcgccgggcaggcggggcagggcgcgtcccgccatggggaacagcggctgcagctcctgctgtcccaccacagcaaagcagtggctcacaggtccggctgtgccagctgcagcccgtgtgctgcgtcgccttcctgacccccaggcccgcctgtaccagaggtgccaggcacctcccgctgcctcccagcagcagagccagcggccccagggggc

SEQ ID NO: 93944 - DNA, 600 bp, Chicken  19866894412957_1
cagagagaaagcatgcctgctgacctggccaagcctctccctgcactgatctgattgcgaccgctgctgacaggagtgatgtggatagggatgcaggcaccctcaccaagcacaaagcgttctgcagtgtcaccttttggtgctcagggtgcccaagggttgagcacccagctgctctcagggaaaccccagagcacacaatgtgttggctgaacagcagcagccgagccgtgctgccagcggaacacttctcctgggtccaggttggtgcttggcgagctgctggtgacctcccagcaytttgctccccttctcaccccggggagcgttgctcacatctgccctcacctggaggagatgtttaaggatgtctaagatgtttaaggcccccagtgggacacaggtccgggtgaggtctgtgtacacgtgcacgatgccaggargggtggcagctgatggccaccgtgcaaggagcaatcctggacttggggcacgtgggtgagtgccagccttgttgtgtgcagcacttcatctgggacacgtgtagcccacggtgggcagtgctggggatgtgggcactgtagggacagggacatcttc

SEQ ID NO: 93945 - DNA, 600 bp, Chicken  19866894412957_2
tcagggtgcccaagggttgagcacccagctgctctcagggaaaccccagagcacacaatgtgttggctgaacagcagcagccgagccgtgctgccagcggaacacttctcctgggtccaggttggtgcttggcgagctgctggtgacctcccagcaytttgctccccttctcaccccggggagcgttgctcacatctgccctcacctggaggagatgtttaaggatgtctaagatgtttaaggcccccagtgggacacaggtccgggtgaggtctgtgtacacgtgcacgatgccaggargggtggcagctgatggccaccgtgcaaggagcaatcctggacttggggcacgtgggtgagtgccagccttgttgtgtgcagcacttcatctgggacacgtgtagcccacggtgggcagtgctggggatgtgggcactgtagggacagggacatcttcatcttgtgacactggtatgcaacagacccctgggcccctcctgcaattcagcatccttcttttgttgaaataccagagaaaagggattgctctgaacaaataaatgatgcttctcccagctccagagcttccaagtagcagga

SEQ ID NO: 93946 - DNA, 600 bp, Chicken  19866894412970_1
atatgactgcagtatacatgcacacattactgaagtgagatagtaaacacctgtaactactgttctcttgcattttaaattaaaatcattttaaatttaaaaagtttctccggaaagagggaaaaagtgaatgagcatgtataacaaccacatccgagaaattctactattgattctgaaataattctgaccagttactgctccattagaattttgatacagggaaacaactgctgctaaaggcattcagggcccagttaatttataattcccaaacagtttcctgaagaattattagtrgaaatgtaaacactgagcattcactgtgcgctacactacytaaaaacttgcacatattttacttaaaatataccccgtttttatatatattgcccaatgattcttccaaagtaatttcagcatattaaaaaaaaaagttttaacaaatcctactatccttaaagaaaaaaaagctattttcaagtcatgaatgtgtacagaagataaatgaatctacacgtattttgcatctgtaaagaaactgcacacatagrtattatgtaatacttgtaaggaaatagttctaatagtgtagtagta

SEQ ID NO: 93947 - DNA, 600 bp, Chicken  19866894412970_2
tagtaaacacctgtaactactgttctcttgcattttaaattaaaatcattttaaatttaaaaagtttctccggaaagagggaaaaagtgaatgagcatgtataacaaccacatccgagaaattctactattgattctgaaataattctgaccagttactgctccattagaattttgatacagggaaacaactgctgctaaaggcattcagggcccagttaatttataattcccaaacagtttcctgaagaattattagtrgaaatgtaaacactgagcattcactgtgcgctacactacytaaaaacttgcacatattttacttaaaatataccccgtttttatatatattgcccaatgattcttccaaagtaatttcagcatattaaaaaaaaaagttttaacaaatcctactatccttaaagaaaaaaaagctattttcaagtcatgaatgtgtacagaagataaatgaatctacacgtattttgcatctgtaaagaaactgcacacatagrtattatgtaatacttgtaaggaaatagttctaatagtgtagtagtaactttttatgcctatttttgtgttaaacgttatatgccta

SEQ ID NO: 93948 - DNA, 550 bp, Chicken  19866894412970_3
cagttaatttataattcccaaacagtttcctgaagaattattagtrgaaatgtaaacactgagcattcactgtgcgctacactacytaaaaacttgcacatattttacttaaaatataccccgtttttatatatattgcccaatgattcttccaaagtaatttcagcatattaaaaaaaaaagttttaacaaatcctactatccttaaagaaaaaaaagctattttcaagtcatgaatgtgtacagaagataaatgaatctacacgtattttgcatctgtaaagaaactgcacacatagrtattatgtaatacttgtaaggaaatagttctaatagtgtagtagtaactttttatgcctatttttgtgttaaacgttatatgcctataaatccaggggatgattttaaggactaatactgccaccagaaatatctcttcagtaagcaacctacttactgctttcttgtttcataccagcttttcaaacaggaacagtgcaaagtggaaatgtctttggagtttacctgtggcaccttctctcttctccct

SEQ ID NO: 93949 - DNA, 600 bp, Chicken  19866894412974_1
ttgcttagacttctattgtgatgaatggtggtttaaccttatttcttttccatttgcagttttatgtgctgtaaatcagtgatttttactgtttttttcatttatttgtattgtatgggtgggcataaggagttcaggtagcaaaccaggcaacctcatgtgagaacagaaatccaactaacaaataaaaaatacccaacaaaacccaccatcaccaccaaactcctcctgtttataaagatcgttatggacttcatgcacaagacaaatgtgattaaattctgattcttttacgttagktgtttgttttagggtttatggtcagtctgttaagtgcagagatgaggagtgacttaaatgtgacattttattaatgaagaactgccaagttgcatttctagaaatgttaatgaaaacatttggtggtggaactgccattctaccygtcccttgttttcatgcaagggatctggtgtgcctgctgcatttcagtggtagtggaaggctgagagacatcttttaggaaaataatgctgttgtaaaaagattaatatcgatgattaggtttgaggacttgatatgtgctctgctttttctgtg

SEQ ID NO: 93950 - DNA, 600 bp, Chicken  19866894412974_2
ccaggcaacctcatgtgagaacagaaatccaactaacaaataaaaaatacccaacaaaacccaccatcaccaccaaactcctcctgtttataaagatcgttatggacttcatgcacaagacaaatgtgattaaattctgattcttttacgttagktgtttgttttagggtttatggtcagtctgttaagtgcagagatgaggagtgacttaaatgtgacattttattaatgaagaactgccaagttgcatttctagaaatgttaatgaaaacatttggtggtggaactgccattctaccygtcccttgttttcatgcaagggatctggtgtgcctgctgcatttcagtggtagtggaaggctgagagacatcttttaggaaaataatgctgttgtaaaaagattaatatcgatgattaggtttgaggacttgatatgtgctctgctttttctgtgccgacatctgattcccctcttttatattgttcttaaacacttttggagcagagaatcaactctcttggttgacctttaagtagactttttgacttctgaaatgtagatagaacttgataggttccttttctggtgtgagtgaatg

SEQ ID NO: 93951 - DNA, 600 bp, Chicken  19866894412980_1
aaatgataaaagcttatagagccttaaatgaaatgtcatggtagaaactataatgaactgcataaaagaaacagagtattcaatacagtagaaggaatgggagaatgtaaaataaccaaatatgtaaagcacggtaaaaagatgactaagatgcaatctgataactaattctggaaacctgaagtcagcatggaaagcaagaaaagcatgcaggctctcttgggaaacagcttcttgtatctaaacatagcaacaaaatcacttgaggtaaaaggacatttccagttgtccttttggaayggaggaccaattctctgttctcagwcctccctcttcccatgctagtccttgtggctggccctgtaagctagcaaggctggagtgaagatgtcaagaacacttgggrcttgtagcttcaatctagagaaataagcattcttggtaattgattattcaagacgaagtaaaaatgaagaagtgcctgagagatgcttgttcaaagaaaagatttgaagctcttgaactttccttttcaaacatattcgtgatggaaaaactgagcccatactccacatagtcctgacaaaacaattattttta

SEQ ID NO: 93952 - DNA, 600 bp, Chicken  19866894412980_2
aaatgaaatgtcatggtagaaactataatgaactgcataaaagaaacagagtattcaatacagtagaaggaatgggagaatgtaaaataaccaaatatgtaaagcacggtaaaaagatgactaagatgcaatctgataactaattctggaaacctgaagtcagcatggaaagcaagaaaagcatgcaggctctcttgggaaacagcttcttgtatctaaacatagcaacaaaatcacttgaggtaaaaggacatttccagttgtccttttggaayggaggaccaattctctgttctcagwcctccctcttcccatgctagtccttgtggctggccctgtaagctagcaaggctggagtgaagatgtcaagaacacttgggrcttgtagcttcaatctagagaaataagcattcttggtaattgattattcaagacgaagtaaaaatgaagaagtgcctgagagatgcttgttcaaagaaaagatttgaagctcttgaactttccttttcaaacatattcgtgatggaaaaactgagcccatactccacatagtcctgacaaaacaattatttttaccaagattaaaatgtcaaaatgtac

SEQ ID NO: 93953 - DNA, 600 bp, Chicken  19866894412980_3
gtaaaataaccaaatatgtaaagcacggtaaaaagatgactaagatgcaatctgataactaattctggaaacctgaagtcagcatggaaagcaagaaaagcatgcaggctctcttgggaaacagcttcttgtatctaaacatagcaacaaaatcacttgaggtaaaaggacatttccagttgtccttttggaayggaggaccaattctctgttctcagwcctccctcttcccatgctagtccttgtggctggccctgtaagctagcaaggctggagtgaagatgtcaagaacacttgggrcttgtagcttcaatctagagaaataagcattcttggtaattgattattcaagacgaagtaaaaatgaagaagtgcctgagagatgcttgttcaaagaaaagatttgaagctcttgaactttccttttcaaacatattcgtgatggaaaaactgagcccatactccacatagtcctgacaaaacaattatttttaccaagattaaaatgtcaaaatgtactgagttactaactagcctttttccattttaccaaagtctattcagagcaccgaacgtggcatgttgcagttccattccaga

SEQ ID NO: 93954 - DNA, 599 bp, Chicken  19866894412984_1
  misc_feature (1)..(111): n is any nucleotide
nnnnnnnnnnnnnnnnnnnnnnnnnnnnnnnnnnnnnnnnnnnnnnnnnnnnnnnnnnnnnnnnnnnnnnnnnnnnnnnnnnnnnnnnnnnnnnnnnnnnnnnnnnnnnnnccattaaaatatttttcctgagctgggttgactgctggggttatatctcagctctcaccagatccatgaaatcatactctgagaccccttcctgcaattatttcattgctatttttgatggaagtctcttccctttgctttttcacttttcactttctgtaggcaagacaataaatgcacttacctgtrarggaggtcgctcttgraagtgcatcattacatttgatttaaaattacagtaacatctatggtccctacaaagtaggatctaaaagtattaagttcattaagtaattattataatgtataatagctatattacattagcgtatcatgtaaacattagctacaagtaacagctttttagctgcatttaacatattttttcatatgatgattgaagtttttgaaaattcacctatgaaaagaggagaattctataagatactgaggaaacctgtaacgttgacatgtgataacgaaattgc

SEQ ID NO: 93955 - DNA, 599 bp, Chicken  19866894412984_2
  misc_feature (1)..(109): n is any nucleotide
nnnnnnnnnnnnnnnnnnnnnnnnnnnnnnnnnnnnnnnnnnnnnnnnnnnnnnnnnnnnnnnnnnnnnnnnnnnnnnnnnnnnnnnnnnnnnnnnnnnnnnnnnnnnnccattaaaatatttttcctgagctgggttgactgctggggttatatctcagctctcaccagatccatgaaatcatactctgagaccccttcctgcaattatttcattgctatttttgatggaagtctcttccctttgctttttcacttttcactttctgtaggcaagacaataaatgcacttacctgtrarggaggtcgctcttgraagtgcatcattacatttgatttaaaattacagtaacatctatggtccctacaaagtaggatctaaaagtattaagttcattaagtaattattataatgtataatagctatattacattagcgtatcatgtaaacattagctacaagtaacagctttttagctgcatttaacatattttttcatatgatgattgaagtttttgaaaattcacctatgaaaagaggagaattctataagatactgaggaaacctgtaacgttgacatgtgataacgaaattgcaa

SEQ ID NO: 93956 - DNA, 599 bp, Chicken  19866894412984_3
  misc_feature (1)..(94): n is any nucleotide
nnnnnnnnnnnnnnnnnnnnnnnnnnnnnnnnnnnnnnnnnnnnnnnnnnnnnnnnnnnnnnnnnnnnnnnnnnnnnnnnnnnnnnnnnnnnnnccattaaaatatttttcctgagctgggttgactgctggggttatatctcagctctcaccagatccatgaaatcatactctgagaccccttcctgcaattatttcattgctatttttgatggaagtctcttccctttgctttttcacttttcactttctgtaggcaagacaataaatgcacttacctgtrarggaggtcgctcttgraagtgcatcattacatttgatttaaaattacagtaacatctatggtccctacaaagtaggatctaaaagtattaagttcattaagtaattattataatgtataatagctatattacattagcgtatcatgtaaacattagctacaagtaacagctttttagctgcatttaacatattttttcatatgatgattgaagtttttgaaaattcacctatgaaaagaggagaattctataagatactgaggaaacctgtaacgttgacatgtgataacgaaattgcaaacaaaattaagttaa

SEQ ID NO: 93957 - DNA, 600 bp, Chicken  19866894412988_1
gcagtatgttgttttttcacaattttactgtgaaaccaatctctgtggtaaaataattgatgctttttaaaggcaagatagtatacgtgaaagatttgaaaagaaatgaaagaattaatcttgaatataatcctattgattatagtttaaaataggttcctgttctcactattggaatttgtatgattatctaccaaatagcacaataagttttatcatcaatttccagtgtattctacaagagagcattcttccattctcttgaacagtttgtttttgcatcatcgttgctattttgtrtaataatctatgcagcttttaaaagagaggaatggagaattggattgcatataaaatatttgatttgcagcgagtaagtatatataattaacaagtcaaataataataaatataattaatgggaaaactctgaaggaagaatattttaaaggatctaagtgacttaagggctacattccttcttttcaaagtgacttaggcttttggaacttaaaactattgattgtcgattatgtttttccttttgtgtcaatttcataagctatatagcttaagtgctttcttcttttgtttttcatt

SEQ ID NO: 93958 - DNA, 599 bp, Chicken  19866894412998_1
  misc_feature (1)..(217): n is any nucleotide
nnnnnnnnnnnnnnnnnnnnnnnnnnnnnnnnnnnnnnnnnnnnnnnnnnnnnnnnnnnnnnnnnnnnnnnnnnnnnnnnnnnnnnnnnnnnnnnnnnnnnnnnnnnnnnnnnnnnnnnnnnnnnnnnnnnnnnnnnnnnnnnnnnnnnnnnnnnnnnnnnnnnnnnnnnnnnnnnnnnnnnnnnnnnnnnnnnnnnnnnnnnnnnnnnnnnnnnnnctgtggttttgatctgagttttccttatccatcagtatgccaaaggctgagcattcacctgtcaaaaggcagcacacatcccygatgctctgatgatcagtggatctgacaggattattcctgacgaagaagttcagtctgagttcaggacctttgtggacccatgccaactggccagtgtaattccagctcagctggtaaaatctgtgccctgaacacaactgccttggaccactaatatgtgcagggtccggggctgccttctttggattgacctttggcagctaaaggattgcatgcagcagaatatatccccactctgctgaggctgggctcttagatgcttcttcacctcatcttgggctttgtccagctcttttgc

SEQ ID NO: 93959 - DNA, 600 bp, Chicken  19866894413003_1
atactgtagggcatcaaatatttacaagctcaccataggcttatgaaaggaaaaaaaaagttaccaagagtggtttaaatcttctgggttcctcagggtgatggtcctggtaagaaaagacaggtgacagttattttaattggtagcagttcaatgcatgcacagatttcagatgactgccagatcctgcattttagtagctgggaaactgaactggatgagacctctttggttcactgagtatcattctataaagctgcaataagactttttagtccattttgaaaccagttttcaccrcccattacttctgggtgactatttcagcacttcatttctgtgattataaacttgtttttacttttttctgctttaaaagcagcctgttactcagtaccaggattgattctgacaaagattaactggaacaggtaggagttctgcttgcagaagggctgatgattaagctttaaaatatgcagtacactgggagaaggctccaaagctggagacctcaacctgaagggagtttttatgggcccattactacagctatttaaaagcacatcatagagttaactgttggtaaatccaacctgt

SEQ ID NO: 93960 - DNA, 550 bp, Chicken  19866894413004_1
aggtttcaaggatatcaaatgattaaagatactgtaaaattcttcccctgagtagggaaggaaaatgaagtcacctttctgaagaagagcagaggaactgacacctgttaattttgttaactgctgttcagcacacagcagccacagtgttggttgtgatttcccaactcagtatgcttaagagataggtgaaggacccagtatgagtttgggatcaaagactgctttgatatacatcttgatttgtttttgtaattattctttcactaccacaatgtacatatgcacacatagaagttrctttatccataattacaagagaacatttcacctactatttaaaatctcttgtttttttttttttatcagttaactctgttgtcaataaaagagctcctgatgaacaccactgacctggtgccaggaacttaattgcacctattagcattagttgccctagtggtctcacctgagtcctttttctctccctgtgggtctatctgaacttaagccaagacagccaggccttgcttgagttatctgggtattt

SEQ ID NO: 93961 - DNA, 599 bp, Chicken  19866894413005_1
  misc_feature (1)..(165): n is any nucleotide
nnnnnnnnnnnnnnnnnnnnnnnnnnnnnnnnnnnnnnnnnnnnnnnnnnnnnnnnnnnnnnnnnnnnnnnnnnnnnnnnnnnnnnnnnnnnnnnnnnnnnnnnnnnnnnnnnnnnnnnnnnnnnnnnnnnnnnnnnnnnnnnnnnnnnnnnnnnnnnnnnnnnnccacaaggttcctctcttccttctattccagcgttctccagtgagaatcttccactgtggtgttaggcaaggctcacaggcatcagggtggaacaggagacacgtctcttcccaggggctggagcaaaggtgacrgaggggaacagggaacacaacagttggagcagaagcaaatcagcatgcacacaccaagctaactaagggcaaagacacaggccttacgcactgccccagcattcctatctgcaacctagagtccgggccagggtgaactgcatctacccacctgctcctgagagcttamggaaaggaagaaaagaaagaaaatagctgtggcgatagcaaattaaggctcatcagctccttggagcaccagaaggaaagaaaccagagcatttacaacaatcatggggttggaggtgacagcggggaac

SEQ ID NO: 93962 - DNA, 600 bp, Chicken  19866894413005_2
aaggttcctctcttccttctattccagcgttctccagtgagaatcttccactgtggtgttaggcaaggctcacaggcatcagggtggaacaggagacacgtctcttcccaggggctggagcaaaggtgacrgaggggaacagggaacacaacagttggagcagaagcaaatcagcatgcacacaccaagctaactaagggcaaagacacaggccttacgcactgccccagcattcctatctgcaacctagagtccgggccagggtgaactgcatctacccacctgctcctgagagcttamggaaaggaagaaaagaaagaaaatagctgtggcgatagcaaattaaggctcatcagctccttggagcaccagaaggaaagaaaccagagcatttacaacaatcatggggttggaggtgacagcggggaacagcaccgaatgacgactaaaaaagccagcctkcacctgcactaccatacccaaggctgtaatttgctgcagtctgaggtgataatgatggcagtaaatgggttacatatagaaacagacagcccaagaataagccaccaactgcttcgtagcaaccaccatcactgcata

SEQ ID NO: 93963 - DNA, 587 bp, Chicken  19866894413005_3
gaagcaaatcagcatgcacacaccaagctaactaagggcaaagacacaggccttacgcactgccccagcattcctatctgcaacctagagtccgggccagggtgaactgcatctacccacctgctcctgagagcttamggaaaggaagaaaagaaagaaaatagctgtggcgatagcaaattaaggctcatcagctccttggagcaccagaaggaaagaaaccagagcatttacaacaatcatggggttggaggtgacagcggggaacagcaccgaatgacgactaaaaaagccagcctkcacctgcactaccatacccaaggctgtaatttgctgcagtctgaggtgataatgatggcagtaaatgggttacatatagaaacagacagcccaagaataagccaccaactgcttcgtagcaaccaccatcactgcatactcagcagaagtaggtacaaagtgctgcgtgcctgcttggaaaggatgctgggctgtggggcgtgtgcgcctttgggtcctgctgaggcaggcagcacttgggagttaactttgtgaaatacagagtgcctagttcacatcagtgtatg

SEQ ID NO: 93964 - DNA, 600 bp, Chicken  19866894413006_1
atccttggtaaaaatgattttctgctctagagaaatgctgatctgaacttaagcctgagcttcatacagtaataaaaaataaatgattgaggaaagcatgaaggcacagattagcagaaaaacaaggaaaagaattaattgtgacactgaggaaccattaggctcatggagtcctttcaagttaatctttagtactgattttatgttatttttttgaaaatgaaagtggcacaagaagtaagtttaattaaacttgttgatgttcaggatgcatctaagctacaagcagaattggaataytgatgatagttaagactggaagatgaagcccagcccagggccagcaggatatgatataaacagagggctcctgaktcacgtaagacagaaaaaaatcttggttttttagttgaaaactgtgtgaatatgattattagtcatatagacacaaaaagattttataccacaaattattaggtaaaatatgtagagttctgtgtatgtggccttggagatgatatctataatgtatattcttattttcatgtattgagataggcattatcatagaatcatagaattacctgggttggaaaggac

SEQ ID NO: 93965 - DNA, 600 bp, Chicken  19866894413006_2
aaaataaatgattgaggaaagcatgaaggcacagattagcagaaaaacaaggaaaagaattaattgtgacactgaggaaccattaggctcatggagtcctttcaagttaatctttagtactgattttatgttatttttttgaaaatgaaagtggcacaagaagtaagtttaattaaacttgttgatgttcaggatgcatctaagctacaagcagaattggaataytgatgatagttaagactggaagatgaagcccagcccagggccagcaggatatgatataaacagagggctcctgaktcacgtaagacagaaaaaaatcttggttttttagttgaaaactgtgtgaatatgattattagtcatatagacacaaaaagattttataccacaaattattaggtaaaatatgtagagttctgtgtatgtggccttggagatgatatctataatgtatattcttattttcatgtattgagataggcattatcatagaatcatagaattacctgggttggaaaggaccacaatgatcatctagtttcaacccccctgctatgtgcagggtcaccagccaccacaccaggctgctcagagcca

SEQ ID NO: 93966 - DNA, 600 bp, Chicken  19866894413017_1
tactgtctaagctgaccatcctactacttctttctgctgaaggagggcaacgataccatattctaatcatctgcttatgaaccaggtcctgaaaccacacatcactaggaggaaacactgcagtcagtgaaaatgaagcatttgaacatgtcacctggatgtgcttgagatgttgagctcattttgaacaaatagaccaaacaattcaatgctgctgaactaatccttctgtgccccacaagttttccatgccagttttcctctgtgcaaatgaaagcgttgagacacaaacttcccaayaagacaggccttctgaaagtcactcaaggctatatcaagtttgaaaggctttggctttaaaggagcccaatgtccctaataggcagccaggacagttgctgaacatacaagatgagcctcattactccaaaagctctccaacaccacaaggagctgacagcgctggttcctgcatgggcactgggaaaaaaagaacattttcaaacagggattttgatttcccagggaaatgtcctctgttggtgaactggctgtattatttgaacagacaatatcagctataaagcactayggatacat

SEQ ID NO: 93967 - DNA, 600 bp, Chicken  19866894413017_2
ttcccaayaagacaggccttctgaaagtcactcaaggctatatcaagtttgaaaggctttggctttaaaggagcccaatgtccctaataggcagccaggacagttgctgaacatacaagatgagcctcattactccaaaagctctccaacaccacaaggagctgacagcgctggttcctgcatgggcactgggaaaaaaagaacattttcaaacagggattttgatttcccagggaaatgtcctctgttggtgaactggctgtattatttgaacagacaatatcagctataaagcactayggatacatttaagtaccagcaatgtaaaatacaaatgcactgaggaagaggcacagtcagcagctccagcaggagcaggayaygtatcacagcagaaatcaaagggagcaaataccaaatacagacatctgtcagagaacaagaagcctaagacaacagaagaagtacactttcacatcagtaactctgactaggaagggaaacagtccttccaggctaccatgacatcctctcactcacgctgctatccagaagccagcagcataaagttacctttacccttggttcagtagtgctcct

SEQ ID NO: 93968 - DNA, 600 bp, Chicken  19866894413017_3
ccctaataggcagccaggacagttgctgaacatacaagatgagcctcattactccaaaagctctccaacaccacaaggagctgacagcgctggttcctgcatgggcactgggaaaaaaagaacattttcaaacagggattttgatttcccagggaaatgtcctctgttggtgaactggctgtattatttgaacagacaatatcagctataaagcactayggatacatttaagtaccagcaatgtaaaatacaaatgcactgaggaagaggcacagtcagcagctccagcaggagcaggayaygtatcacagcagaaatcaaagggagcaaataccaaatacagacatctgtcagagaacaagaagcctaagacaacagaagaagtacactttcacatcagtaactctgactaggaagggaaacagtccttccaggctaccatgacatcctctcactcacgctgctatccagaagccagcagcataaagttacctttacccttggttcagtagtgctcctgagaaaggctggatcaaggtcagatatcacaagagcacctcctgttagcaggcaaagaaaggagactggggctagagccac

SEQ ID NO: 93969 - DNA, 600 bp, Chicken  19866894413017_4
ctaataggcagccaggacagttgctgaacatacaagatgagcctcattactccaaaagctctccaacaccacaaggagctgacagcgctggttcctgcatgggcactgggaaaaaaagaacattttcaaacagggattttgatttcccagggaaatgtcctctgttggtgaactggctgtattatttgaacagacaatatcagctataaagcactayggatacatttaagtaccagcaatgtaaaatacaaatgcactgaggaagaggcacagtcagcagctccagcaggagcaggayaygtatcacagcagaaatcaaagggagcaaataccaaatacagacatctgtcagagaacaagaagcctaagacaacagaagaagtacactttcacatcagtaactctgactaggaagggaaacagtccttccaggctaccatgacatcctctcactcacgctgctatccagaagccagcagcataaagttacctttacccttggttcagtagtgctcctgagaaaggctggatcaaggtcagatatcacaagagcacctcctgttagcaggcaaagaaaggagactggggctagagccacca

SEQ ID NO: 93970 - DNA, 600 bp, Chicken  19866894413023_1
tcagtattgactgagtattacttagtgtgacgtatttcctccccacactcataaaaaaaataaaatctgaaaatatcagggagttcagtttctctaaaaattatggatattcaatagaaaattttgaggctttctctctatagtacgcactatttttgcctgtagtcttcaagctaaatatgctgggttttttggtgtttgcttaatattgctgtttttattactacaaataactgcaagctgcttttcataaagttgaaattatacaatgaaaactcacctggacttctgaggacacartgttcaaagacaygayttctaaatagatcactgagaacctagtgtaagtgggatattgacttttgtagttgtaagttcaattttaaaccaggtgaagtcagaaaatctatcagtaagataggacagagtgtctgggactcatgaagcaatcatgaaccttggactttggaagatacaaagcacagctgagttccttctggtgtgatatgttgttttacaccctagagttggctgcttatgaaaatcagcattatgaaaggacttcttccgttcctgctgagatggaaatagaagttaatt

SEQ ID NO: 93971 - DNA, 600 bp, Chicken  19866894413023_2
agtattacttagtgtgacgtatttcctccccacactcataaaaaaaataaaatctgaaaatatcagggagttcagtttctctaaaaattatggatattcaatagaaaattttgaggctttctctctatagtacgcactatttttgcctgtagtcttcaagctaaatatgctgggttttttggtgtttgcttaatattgctgtttttattactacaaataactgcaagctgcttttcataaagttgaaattatacaatgaaaactcacctggacttctgaggacacartgttcaaagacaygayttctaaatagatcactgagaacctagtgtaagtgggatattgacttttgtagttgtaagttcaattttaaaccaggtgaagtcagaaaatctatcagtaagataggacagagtgtctgggactcatgaagcaatcatgaaccttggactttggaagatacaaagcacagctgagttccttctggtgtgatatgttgttttacaccctagagttggctgcttatgaaaatcagcattatgaaaggacttcttccgttcctgctgagatggaaatagaagttaattataaggcctaaca

SEQ ID NO: 93972 - DNA, 600 bp, Chicken  19866894413023_3
attacttagtgtgacgtatttcctccccacactcataaaaaaaataaaatctgaaaatatcagggagttcagtttctctaaaaattatggatattcaatagaaaattttgaggctttctctctatagtacgcactatttttgcctgtagtcttcaagctaaatatgctgggttttttggtgtttgcttaatattgctgtttttattactacaaataactgcaagctgcttttcataaagttgaaattatacaatgaaaactcacctggacttctgaggacacartgttcaaagacaygayttctaaatagatcactgagaacctagtgtaagtgggatattgacttttgtagttgtaagttcaattttaaaccaggtgaagtcagaaaatctatcagtaagataggacagagtgtctgggactcatgaagcaatcatgaaccttggactttggaagatacaaagcacagctgagttccttctggtgtgatatgttgttttacaccctagagttggctgcttatgaaaatcagcattatgaaaggacttcttccgttcctgctgagatggaaatagaagttaattataaggcctaacagat

SEQ ID NO: 93973 - DNA, 599 bp, Chicken  19866894413027_1
  misc_feature (1)..(62): n is any nucleotide
nnnnnnnnnnnnnnnnnnnnnnnnnnnnnnnnnnnnnnnnnnnnnnnnnnnnnnnnnnnnnnatgcatcttagagagaactgacagtatgttcaaacagagtaagtaaaaaaaatatatgcagttatttgcatatgctgaaaaatattgaaggataagttttttggagtcagaaatctgagaaggataagagctatgttcatgttctcttcttgccgagcagtttggctaagctcttaatcttcactaactgaaaaataaaaagcacttttctagtagactcatgttgccttaatcctaratctggaaatatatggttcatgtgcacagtaccagctctgctgctcttgtatcttttgccattcagcctgcaatgagtggactgaacttccccacagcactaggcaggttctgctttgtacaggtagccactgtttcagcacacattcttctgatataccattcttccttatgacactctgactttctaacccacaagttagaatgacatccctgtactgtagtagccttagttgacctttcttccaygtgtattttgatcagtatttagtagcgatgggacttggtcacattatctaa

SEQ ID NO: 93974 - DNA, 500 bp, Chicken  19866894413027_2
actgaaaaataaaaagcacttttctagtagactcatgttgccttaatcctaratctggaaatatatggttcatgtgcacagtaccagctctgctgctcttgtatcttttgccattcagcctgcaatgagtggactgaacttccccacagcactaggcaggttctgctttgtacaggtagccactgtttcagcacacattcttctgatataccattcttccttatgacactctgactttctaacccacaagttagaatgacatccctgtactgtagtagccttagttgacctttcttccaygtgtattttgatcagtatttagtagcgatgggacttggtcacattatctaactgttaaatcctctttccattytcaacccaccccaaatctagtctcactttctctcagatgggtaaaaagacctagttccacatgacctatcactcttagtatgcgtattagcttgaaacatcctgctgccagccataccatctcttgg

SEQ ID NO: 93975 - DNA, 427 bp, Chicken  19866894413027_3
gtgcacagtaccagctctgctgctcttgtatcttttgccattcagcctgcaatgagtggactgaacttccccacagcactaggcaggttctgctttgtacaggtagccactgtttcagcacacattcttctgatataccattcttccttatgacactctgactttctaacccacaagttagaatgacatccctgtactgtagtagccttagttgacctttcttccaygtgtattttgatcagtatttagtagcgatgggacttggtcacattatctaactgttaaatcctctttccattytcaacccaccccaaatctagtctcactttctctcagatgggtaaaaagacctagttccacatgacctatcactcttagtatgcgtattagcttgaaacatcctgctgccagccataccatctcttgg

SEQ ID NO: 93976 - DNA, 388 bp, Chicken  19866894413035_1
gcagccgtctaaaattggtttagtgattctcatcccagtaacatctatgtttgtgcactgactgatgagaatctaagcagctacttccaacatggatgtcaatataggtctgaaggtaagcaagacaagggccatccaggatattgtggcttttattagtcagtctcaccagaaaaaaattaaatatctgctacatcttgagcccagaaagaaaggaggagactataaaactacatcacctccccaggtctactgatcaataaccaaagtttgtggcagggccagacattgtttataccmcctacctccagtaacaagacctgtgatgtctatccaaacaatcatcagaacacagagttggtaattgcaagccaccaactaaacagag

SEQ ID NO: 93977 - DNA, 600 bp, Chicken  19866894413056_1
tagagagaaaataatcctatgttgtttttcctgctccttaactcatcaaaattgagaattctctttctgttaggtgtaatctttaaaagcttgtttgctgcatggaataagtagaagtaaaaataataaaaatgaaaataatacttttcagctgaggaaatatacaaaaaaaaattgaacaaattcagatcactccatttgatattcagtttctgatctcctgctgagtgcctgatggaaatttttactttggctgcctcatacttttaatttcccccttgggcaattcaccatgactgkatggcatctcccatgttgtgcagtggcaatgggaaaggtgctgctgcagtgggtgacccatgggtagttagtcacctgttgtcatgttgtctgcattgatgtgcgtgcaccagttgctatcagctggtggcagagtgactcaagaaggaaaccagcaagcagaaatattttcatatgggtcagtttgaccaaagttggtttggaaatgagtacgccattggtgtgccttatgtctccttggtttctctctcacaagttggcaagagaagttgtggatctgtggtggccccacagttgctg

SEQ ID NO: 93978 - DNA, 599 bp, Chicken  19866894413067_1
  misc_feature (1)..(27): n is any nucleotide
nnnnnnnnnnnnnnnnnnnnnnnnnnnactaagtagtttttgcctgctgaacctaatggattgtcagacactgcttgacagtattctactaggcaaggccacagaaaatcaatacatcttaggcaaggtttaatttatttgtaggttcttacaactaatgacttgccttttctgtttgttgattctctttttagcttttgctctcgcgaataactacaattttatcctcccattgtaatacaaactacaagaactgtgatgtcattttaaaatttaaaatcacccagcttttaaaaaagrctgggtacaggaatgagcaacacagaaaaactagaaacggaatttgacatggtagaatcaagtttatctgacttcacccctttgatgacacaatgatttttccattataatatttatattgcagcagcacctacaggttccaaacagtattggatatcttcctgccagatgctatacagttgtattctaactgaaaatctctcctgtgatgagcttgtaatctgaataggtccaacaaaaatagtatgaaggaaagtaatgctgtcactataaataaagaaataagatattgaaagaca

SEQ ID NO: 93979 - DNA, 600 bp, Chicken  19866894413070_1
tcctgcagtatatcacagaatgcgtaccttaacacttttgttttcccttcaagtttacagcaacttatggaattctatttctgcatacgaactgagtcgggatgacagctacacacagctgtaaggggctttttttgttgttacccttgtttggttgtgcacgcttgtgtgagaaactgatatcagaatcaggacttacctcctaactaatggaagaaaaatcaacagcttggctatttgcatgcttcccagtctccctctgacactagaatttaagactacgtctgcttctagctttgkgttryaatggaatattgatgatgagagaagcagaaacatgtgtgaagatctccagacagaagttttgaagataagatttaatcttaagtcctcaggctaatcaaaacacaatagatatgctatcaacagtaagtaacagggctttcctttttctctaataggaaagctttaacaaagctcataaataaccttctatgtcaacattagctatagcaaaactagttaaagcacagagacctagccaagtttctccatactgccctaacaaggcatctgagaaaggtctcgagttaaaaaact

SEQ ID NO: 93980 - DNA, 600 bp, Chicken  19866894413070_2
gcagtatatcacagaatgcgtaccttaacacttttgttttcccttcaagtttacagcaacttatggaattctatttctgcatacgaactgagtcgggatgacagctacacacagctgtaaggggctttttttgttgttacccttgtttggttgtgcacgcttgtgtgagaaactgatatcagaatcaggacttacctcctaactaatggaagaaaaatcaacagcttggctatttgcatgcttcccagtctccctctgacactagaatttaagactacgtctgcttctagctttgkgttryaatggaatattgatgatgagagaagcagaaacatgtgtgaagatctccagacagaagttttgaagataagatttaatcttaagtcctcaggctaatcaaaacacaatagatatgctatcaacagtaagtaacagggctttcctttttctctaataggaaagctttaacaaagctcataaataaccttctatgtcaacattagctatagcaaaactagttaaagcacagagacctagccaagtttctccatactgccctaacaaggcatctgagaaaggtctcgagttaaaaaactacag

SEQ ID NO: 93981 - DNA, 600 bp, Chicken  19866894413070_3
cagtatatcacagaatgcgtaccttaacacttttgttttcccttcaagtttacagcaacttatggaattctatttctgcatacgaactgagtcgggatgacagctacacacagctgtaaggggctttttttgttgttacccttgtttggttgtgcacgcttgtgtgagaaactgatatcagaatcaggacttacctcctaactaatggaagaaaaatcaacagcttggctatttgcatgcttcccagtctccctctgacactagaatttaagactacgtctgcttctagctttgkgttryaatggaatattgatgatgagagaagcagaaacatgtgtgaagatctccagacagaagttttgaagataagatttaatcttaagtcctcaggctaatcaaaacacaatagatatgctatcaacagtaagtaacagggctttcctttttctctaataggaaagctttaacaaagctcataaataaccttctatgtcaacattagctatagcaaaactagttaaagcacagagacctagccaagtttctccatactgccctaacaaggcatctgagaaaggtctcgagttaaaaaactacagt

SEQ ID NO: 93982 - DNA, 579 bp, Chicken  19866894413078_1
aacagttattgcaccaaatattaatatccaaactgctcctgccttaaagatatttttgtctgtgaatagctgcaaacttgtaacacctcagtaaagattcctagatttgagactgtgaaatagtaagtaaaggatgaaaggttaaaaaataaaggacttttcaatacttgttcaaatatttgattcattacagaaacaaagttcaacgtttgtcagtgagtttccaaatgtaattagagttgttaatgatccaacaaaagatatcacaataaaattctgatatcaattcttctgaaatgwtataagaccaggaatttaattacaggttttttactcattattacaataactatgtcagtaagttatgtaagctatggttaaatggctctgcaggttttgtagtttagatccaagtgtttttagaactgattatttttcccagtacatttaaatccagtgtttatgctttatgaactcaaacccagtcctatctggtgagatggggtggacttttattaccagaaaagccctgagaagttctcagtctgttttgttttctgaaatcttattacaaaatat

SEQ ID NO: 93983 - DNA, 600 bp, Chicken  19866894413082_1
cttcttgctggaagctatctatcttcaaataataaactttgcaattttaaaaaatactttctttcttcactgcaataagagcaacaatatttacacaaaacagttattctaaatagtacattttggtaattgataagaacaacaccaactgtatttatatcaaactgactgccttcatggtactcaaacagtgttaagtgggaagtaaaaggactttagttaattatcgataatttatttcttcatttactttggctgggcacgtgttcaggtggtttcagtattagtataaaaatcccrgaccaaagaaaccaatgcatactgggtctgttatcaccttatttcattgttgtttcccttagaagggcatggtgccagcatgcttgaagtgggagaatcacaaactttatgtaaaaataactgtcctggtactaggaacccttttaataattttgtttrcttcagccatttttggggcgcaactagttgcccaaaacaaaggatctgtcacctagatacctttatagcctttttgtttggtttgtttttagtttggcctgtcttactgtgtgttgatcactagtgatggtatagagatta

SEQ ID NO: 93984 - DNA, 536 bp, Chicken  19866894413082_2
tcaaactgactgccttcatggtactcaaacagtgttaagtgggaagtaaaaggactttagttaattatcgataatttatttcttcatttactttggctgggcacgtgttcaggtggtttcagtattagtataaaaatcccrgaccaaagaaaccaatgcatactgggtctgttatcaccttatttcattgttgtttcccttagaagggcatggtgccagcatgcttgaagtgggagaatcacaaactttatgtaaaaataactgtcctggtactaggaacccttttaataattttgtttrcttcagccatttttggggcgcaactagttgcccaaaacaaaggatctgtcacctagatacctttatagcctttttgtttggtttgtttttagtttggcctgtcttactgtgtgttgatcactagtgatggtatagagattacctttgaattttcgtgtgatgttttctggagacttcttcatatctaaagtattctcagttcagataagctcatgttaaacacgctaacacagtaa

SEQ ID NO: 93985 - DNA, 600 bp, Chicken  19866894413086_1
ttgtatttgttataagccctgaagatgttgcaactagcctggagtttacatttctgttagcacgcagccaagatgaacagcagagatagcacacagcagtgccaagccaggggaagggaggcgtagcatgaagaaattcttggagtgatgaattttctgaaatgattactgagagtggcaaagagaattacttaagccaagcagaaattcctgattcagaaattagcccaagacggatcccctaggccaagccttttgcacagacatgccctgctaaatgcactccccatttctccagcrgagcagaaagctctatcggcattccttggatgccattcatggagggatgtgtgaaagggtcactattttgtgcataaccagagagattctgtgtttgcccaggtcgtgtgtcactgggaacatcccagagcaaatggcaaarcccttataaaagtggtgttgaatcacagatcacagaatgatttgggttggaagggacctcaaggatcatgaaactccaaacccccaccacaggcagggccaccaacctccacatttaataccagaccaacctggccttgaacacctccagggatggac

SEQ ID NO: 93986 - DNA, 600 bp, Chicken  19866894413086_2
gagtgatgaattttctgaaatgattactgagagtggcaaagagaattacttaagccaagcagaaattcctgattcagaaattagcccaagacggatcccctaggccaagccttttgcacagacatgccctgctaaatgcactccccatttctccagcrgagcagaaagctctatcggcattccttggatgccattcatggagggatgtgtgaaagggtcactattttgtgcataaccagagagattctgtgtttgcccaggtcgtgtgtcactgggaacatcccagagcaaatggcaaarcccttataaaagtggtgttgaatcacagatcacagaatgatttgggttggaagggacctcaaggatcatgaaactccaaacccccaccacaggcagggccaccaacctccacatttaataccagaccaacctggccttgaacacctccagggatggacggggcatccactctctgggcagctgttccagcacctcaccactctcacctctgttgaggtgcagagtgtacagctgcagccacttccagatgtgtgatgaggagtgacatatctctccactgtccctcctcattgagccctt

SEQ ID NO: 93987 - DNA, 600 bp, Chicken  19866894413090_1
tttacattttgttgtgtttttgttattcctttaaagctattggtcccattgtaaaatacccttctctttaggaatccattggacttgtcatttatttcaatgctctcactccaaacaaagctgtaggagtgctagtcttttaaagcccttggtaacaatgcatctgcactcagtgctgctctctcctgtgtgggagctgcaggcttgttgcgctgcacactggcccgttgatgctgacagatgtgctgaggcagcagtgaggccagcgctgcccataaagcatccactggatgggctccyctcaggccagctgaagaacccgagccccgccatgcccrgtatccagccagcaggctgatagcacatcagccctcgcaccgcattaggaccctggtcagttccagggccgtggccactctgggctgggtgctccccaccatgcagcccccggctccccacaggcccagggtgcagctgttgttccttaaggccaacagggccctctctgtgtgttccatcctgctgggaccatggtgaaggagggggagctcctctcagctttagctggagcactaagatccagcatcaacatcaccatat

SEQ ID NO: 93988 - DNA, 600 bp, Chicken  19866894413090_2
attggtcccattgtaaaatacccttctctttaggaatccattggacttgtcatttatttcaatgctctcactccaaacaaagctgtaggagtgctagtcttttaaagcccttggtaacaatgcatctgcactcagtgctgctctctcctgtgtgggagctgcaggcttgttgcgctgcacactggcccgttgatgctgacagatgtgctgaggcagcagtgaggccagcgctgcccataaagcatccactggatgggctccyctcaggccagctgaagaacccgagccccgccatgcccrgtatccagccagcaggctgatagcacatcagccctcgcaccgcattaggaccctggtcagttccagggccgtggccactctgggctgggtgctccccaccatgcagcccccggctccccacaggcccagggtgcagctgttgttccttaaggccaacagggccctctctgtgtgttccatcctgctgggaccatggtgaaggagggggagctcctctcagctttagctggagcactaagatccagcatcaacatcaccatatcgggtttggtttagtcctcacagtacaagtgatgcttt

SEQ ID NO: 93989 - DNA, 599 bp, Chicken  19866894413097_1
  misc_feature (1)..(183): n is any nucleotide
nnnnnnnnnnnnnnnnnnnnnnnnnnnnnnnnnnnnnnnnnnnnnnnnnnnnnnnnnnnnnnnnnnnnnnnnnnnnnnnnnnnnnnnnnnnnnnnnnnnnnnnnnnnnnnnnnnnnnnnnnnnnnnnnnnnnnnnnnnnnnnnnnnnnnnnnnnnnnnnnnnnnnnnnnnnnnnnnnnnnnnncccatagctcatgacaagtgtttttgttgttgctgtttttttttaatgcagcttgaacaaatttctgccctctaatatctagtgaatatttccaggtatatgcaggcacatcggggwtggaaagagatgggggagggtgaaaaggagtcattatgtagctggaaaaaaaatcaaaatgccatttccctygatgctattgaaaagactcgcttttctttgtctttccaggttctcttttctgtttaaaggacactccaatttgaagagaactgttttctcatctcaggctcaggcagccatcccacaagctttactcgggaaaccactaactgatgttagatttacacagtgggtagtttttatctatgtttttcttaaaagcagcatcctgggggaatctctcagtggcaaaacca

SEQ ID NO: 93990 - DNA, 599 bp, Chicken  19866894413097_2
  misc_feature (1)..(111): n is any nucleotide
nnnnnnnnnnnnnnnnnnnnnnnnnnnnnnnnnnnnnnnnnnnnnnnnnnnnnnnnnnnnnnnnnnnnnnnnnnnnnnnnnnnnnnnnnnnnnnnnnnnnnnnnnnnnnnncccatagctcatgacaagtgtttttgttgttgctgtttttttttaatgcagcttgaacaaatttctgccctctaatatctagtgaatatttccaggtatatgcaggcacatcggggwtggaaagagatgggggagggtgaaaaggagtcattatgtagctggaaaaaaaatcaaaatgccatttccctygatgctattgaaaagactcgcttttctttgtctttccaggttctcttttctgtttaaaggacactccaatttgaagagaactgttttctcatctcaggctcaggcagccatcccacaagctttactcgggaaaccactaactgatgttagatttacacagtgggtagtttttatctatgtttttcttaaaagcagcatcctgggggaatctctcagtggcaaaaccagcacaagmagcactaacagtcaatagagcatctgaggagttcgcagggttaaatctattgtttccagggttt

SEQ ID NO: 93991 - DNA, 600 bp, Chicken  19866894413097_3
agatgggggagggtgaaaaggagtcattatgtagctggaaaaaaaatcaaaatgccatttccctygatgctattgaaaagactcgcttttctttgtctttccaggttctcttttctgtttaaaggacactccaatttgaagagaactgttttctcatctcaggctcaggcagccatcccacaagctttactcgggaaaccactaactgatgttagatttacacagtgggtagtttttatctatgtttttcttaaaagcagcatcctgggggaatctctcagtggcaaaaccagcacaagmagcactaacagtcaatagagcatctgaggagttcgcagggttaaatctattgtttccagggtttgattcaatctctattttgtcaacstgtttaagttccaggccccattcccaccagctacaaagaagggtgaagagcccagagtaaactcatttgggctttttaagtacaacatgattcatatttgtgtgcwgcctctgtcatgggctgtgctctgcccactgccagaaaccatgtcatcctctcaatcttgtgccagagggggcaggtggacaagataacttaatagctcttattca

SEQ ID NO: 93992 - DNA, 600 bp, Chicken  19866894413097_4
ttctttgtctttccaggttctcttttctgtttaaaggacactccaatttgaagagaactgttttctcatctcaggctcaggcagccatcccacaagctttactcgggaaaccactaactgatgttagatttacacagtgggtagtttttatctatgtttttcttaaaagcagcatcctgggggaatctctcagtggcaaaaccagcacaagmagcactaacagtcaatagagcatctgaggagttcgcagggttaaatctattgtttccagggtttgattcaatctctattttgtcaacstgtttaagttccaggccccattcccaccagctacaaagaagggtgaagagcccagagtaaactcatttgggctttttaagtacaacatgattcatatttgtgtgcwgcctctgtcatgggctgtgctctgcccactgccagaaaccatgtcatcctctcaatcttgtgccagagggggcaggtggacaagataacttaatagctcttattcatttgaaattttctgtggttatagggtaggtcaccttgttcagcaagagagggaaagcatgtaaatcttcagcccaaactcaagctctg

SEQ ID NO: 93993 - DNA, 576 bp, Chicken  19866894413097_5
gaaaccactaactgatgttagatttacacagtgggtagtttttatctatgtttttcttaaaagcagcatcctgggggaatctctcagtggcaaaaccagcacaagmagcactaacagtcaatagagcatctgaggagttcgcagggttaaatctattgtttccagggtttgattcaatctctattttgtcaacstgtttaagttccaggccccattcccaccagctacaaagaagggtgaagagcccagagtaaactcatttgggctttttaagtacaacatgattcatatttgtgtgcwgcctctgtcatgggctgtgctctgcccactgccagaaaccatgtcatcctctcaatcttgtgccagagggggcaggtggacaagataacttaatagctcttattcatttgaaattttctgtggttatagggtaggtcaccttgttcagcaagagagggaaagcatgtaaatcttcagcccaaactcaagctctggtgtaagcaactttcagagaagctgaacctataatccttctcttattatcttgtaatttcttggggggcattcctttacaga

SEQ ID NO: 93994 - DNA, 600 bp, Chicken  19866894413103_1
gccctcctctggacccactccaagagttccacatctttcttgtgacgctgtactccagatggggcctcacaagagctgagtagagggggacaatcacctccctctccttgctggccaccccttttttaatgcagcccagaacacagttgaccttccaagctgcattagtagagctattctctacacaacagccagattaaagaagcttaatgattttcagtcaaatccttgatgggaaaatcaaaaccatgaagaagaactttatgacactctcactgtttgttttgataaaatactggmagacactggcagttatatacttctgtaactatgaactagccttgctagttcaagacacgtggaccactgttgcagttaggacacagttcagacttacagctatagactcagtggcaggcagctgccatgagaagtaaggactgaaagactctcttgcagggctctgtcttgcagctaaactaaaatagaagacagtaaaattgtttgctttatctttgtgcagcacctcattcctgaggttatgctaagtgccactatcacaaaaataatgaacatgaaatatgcctctagactgcgcat

SEQ ID NO: 93995 - DNA, 600 bp, Chicken  19866894413107_1
actactttgcagtttattttcaaaatgaggcagatattcttgaacttctactttgcagatatgataattattaaaatattaatataaatatatcagttttgtttttctgcactacaaaagctgtgcctaatagaaaatactgggttctgtttgttggaaaataattcattgcaagcattcttcatatgtagcttcatgggcctctggtactttgaccatatttgtgacctgttagaataagatttgtaaaagaacatcattcaatataaatagtgtcattctgatgctagttaatccaaygggagttaaaaaaagtgggaagaagtggtgaccatacctgcataggatctatgtgctgattaatccagagactggatttcttttgtccttggagaagggagtggtcactcacagtagagaaatgctgaagattgacaagaggatcactgcattaaagtctgcttaggataaaccgttgtacattaaagcatgagattgttacccaacattgctaggcctgatataaatgtcttctatgcactgtgttacatactatcttcattattgacaactgtggattatgaactagatatcaaaatt

SEQ ID NO: 93996 - DNA, 600 bp, Chicken  19866894413109_1
aatcgtccaccagcactttctgctacccacatccagctctggcatggaattctgtccatgggcacacaggggactgctttaaagtcccggcaaaaggtaactgtgtcaccacctgcttgatttccccagggtgtaaaacgatatgcagccagcgcagattatttccatctgctggggctgcaagggcaggaggcttgatgttttatttacaagcccgtgtgcagaggggaaccaagtgcctggagaagttctccatgaacagagacattgcgttgagttacagcttgttcccagacagcycggtgtccattctcacaaagtgcttttttgcctgaatattttttcctatctgaaaatgtggtttcaagtgaagcaatatayatttaggrggagacgggggaatgtggccattgtgacagatgtttttcaatattccagcgagggaagatgaaatgaagcaaaaagaaaacttgcctccacttgagctttggagcaaaataaagctattttgtttcaaaacattcatccaagatggaaaaagctgttctcatcagtattgctgttgtttttttaatctttgttgagaatgcctcaaaaaca

SEQ ID NO: 93997 - DNA, 600 bp, Chicken  19866894413109_2
aagtcccggcaaaaggtaactgtgtcaccacctgcttgatttccccagggtgtaaaacgatatgcagccagcgcagattatttccatctgctggggctgcaagggcaggaggcttgatgttttatttacaagcccgtgtgcagaggggaaccaagtgcctggagaagttctccatgaacagagacattgcgttgagttacagcttgttcccagacagcycggtgtccattctcacaaagtgcttttttgcctgaatattttttcctatctgaaaatgtggtttcaagtgaagcaatatayatttaggrggagacgggggaatgtggccattgtgacagatgtttttcaatattccagcgagggaagatgaaatgaagcaaaaagaaaacttgcctccacttgagctttggagcaaaataaagctattttgtttcaaaacattcatccaagatggaaaaagctgttctcatcagtattgctgttgtttttttaatctttgttgagaatgcctcaaaaacaccgtttccatgctcctaattcaattctcctgaaattctttgccttcagaatgctttggtaatttggtcttctggctttgtt

SEQ ID NO: 93998 - DNA, 600 bp, Chicken  19866894413109_3
gcaaaaggtaactgtgtcaccacctgcttgatttccccagggtgtaaaacgatatgcagccagcgcagattatttccatctgctggggctgcaagggcaggaggcttgatgttttatttacaagcccgtgtgcagaggggaaccaagtgcctggagaagttctccatgaacagagacattgcgttgagttacagcttgttcccagacagcycggtgtccattctcacaaagtgcttttttgcctgaatattttttcctatctgaaaatgtggtttcaagtgaagcaatatayatttaggrggagacgggggaatgtggccattgtgacagatgtttttcaatattccagcgagggaagatgaaatgaagcaaaaagaaaacttgcctccacttgagctttggagcaaaataaagctattttgtttcaaaacattcatccaagatggaaaaagctgttctcatcagtattgctgttgtttttttaatctttgttgagaatgcctcaaaaacaccgtttccatgctcctaattcaattctcctgaaattctttgccttcagaatgctttggtaatttggtcttctggctttgttcaaacagg

SEQ ID NO: 93999 - DNA, 600 bp, Chicken  19866894413109_4
aagcaaaaagaaaacttgcctccacttgagctttggagcaaaataaagctattttgtttcaaaacattcatccaagatggaaaaagctgttctcatcagtattgctgttgtttttttaatctttgttgagaatgcctcaaaaacaccgtttccatgctcctaattcaattctcctgaaattctttgccttcagaatgctttggtaatttggtcttctggctttgttcaaacaggaagccaagtgtaaagtaattactcatcttacagcagcaccagtccatctctcagccaccaccagcrgaaggacacagaggtgggtggcccaggccaagacagcagccctcagaagagcttccacctcacgctctgctgcagagctcctctcccttgctctgtctccagctcttctcccttagaagaagtgctccatgtgtttcatttagagaattcaaagcagcttggtattagcttagctctggctcctattcacaacaggaaccatgctgaacttcaagcccagattcagactcgagcttcatttcagaagtgtttggagtttgatttagacctgaatctaatttgtaacttctgtctgcttca

SEQ ID NO: 94000 - DNA, 600 bp, Chicken  19866894471407_1
gtaaaggaactagagtgaatggaaagtggaaagatgttgcaaaggaaaagcactcacccatctctgaagatctaggctcacaggaaaaactccacaagagaagaactcccaaccagatatccttccccaggggcagtcaacccttaaatggggtctaagagaggtgcagccaggctccaccccttctggtcacacagctgaattgccttcacctgtgctcccagggcccagggggtcctttccccaggtgctcaatcagtggttcaggtcatgactcaacagttaccatacaccccatgygttccatctccctgccctagctgaaaagaagcatttgctccaaatgcatcttcaaaataatcacaggtttcaaataaacatctaaagtgtacttcactgcccacaatctcctgctccagtagcatgcttcgtgtcagcacctttcgagagaaaagtgactgcagaagtagctcaggtgaactcaaaaacttgagatgagactttcagcactgggtcctcagcaggcattagtcagaatggttcctttggctctgcattcagagaacaaaaaaaatcaagcccaatttccagagttatccc

SEQ ID NO: 94001 - DNA, 600 bp, Chicken  19866894471409_1
acagactctatctacttgtggttcacagcagtcaaaactcatataagtatagtgacgccttgtcagaatttgtcttataagccttattggaagcatggttatattaattgtgacttagcccaaaagtaacacacctggagtgtaatgcatatacatgtctttgtgcattacccaaacaagttcatatctgctctaaaccgtagaactacatgtgtggactgtagttgaattatgtattggaagttttttgacttcttcatttagacattagtatcccaggtagatgaatgggctattcartgaatttaggttctgttttcaacttagtctcaacagtgtataatttaaagtatgcaaattattcaagaaaaataaaagtagcctgtgctgatgtccttcctgtcttcagtaaactaaggaactactatgtaagttaatccatttaaaaatacctcaggtgttacttcattatactctcatctctcgctgtatacatacatgtgagttcatatgttactgtttacatattcctggtactctgaattaccttattagcttattagctttatgaagtcaaagattagcccgaggtgatgtgac

SEQ ID NO: 94002 - DNA, 600 bp, Chicken  19866894471414_1
aagcattgttaagcactggaataggctccccagggaggtggttgggtcaccatccctggatgcgtgtagaaactgtttggatgtggtgctcagggacatgatttagcggagggttgttacggtagtatggctaggttgcaattggactctgtgatctttacctgagcaattctgtgattctacgattgattaacaagattgctttagttgaaatgatactgactttctgatcttcaggattatgtcttaggaactctcactgtacaggaactagtgacaaattggtggaacttagatgtytggaaactggaagacaagccttacaaacagcaacaataactttcattctgttaaatatcaaaaggtggctaattaaacatttgataatgcctcaatttaaaaaagcttctagctttatttgaacatcatctattcgtattttaggttatttgaaagaagactgagcacagacaaactttaaaaagaagaaaagtacattcatgtgaacaactgactcaggacaaagatagtctgttatcagtagagggacagtactcataaaacagtcacttgatctctcaggctatccacaagggaaac

SEQ ID NO: 94003 - DNA, 600 bp, Chicken  19866894471418_1
agcttggtgtcatcagcaaacttgctgggggtgcactcaatcctgtcatttatgtcattgataaagaagttaaagaatactggtcccaagacagacccctgggagacagtgcttgttaccagcctccacctggccagagagccattaaccacaaccccctggctgcaaccatccaaccaattcctcatcctccaaacagtccatccttcaaatacatctctctctactttagagataaggccttgcagaagtcaagggagatgacatcggttgtcttccctttgtcctccagtgctgtcrctccattgtagaaggccaccagactggtcaggcacaaccttcccttggtgaagccatgttggcttgtcccttatgtgcyttaacatgtcatccaggaggatctgttccatgatcttcccatacrcagaggtgaggctcactggccctgtagttcctcaggtcctctttcctgtctttcttgtaaaagggagtgatgtttccctttttccagtccccagcgacttcacctgataatgacgacttttcaaatatgatgaagagcggctcggcagccatatcagccagctcctttaggaccct

SEQ ID NO: 94004 - DNA, 600 bp, Chicken  19866894471418_2
ctggtcccaagacagacccctgggagacagtgcttgttaccagcctccacctggccagagagccattaaccacaaccccctggctgcaaccatccaaccaattcctcatcctccaaacagtccatccttcaaatacatctctctctactttagagataaggccttgcagaagtcaagggagatgacatcggttgtcttccctttgtcctccagtgctgtcrctccattgtagaaggccaccagactggtcaggcacaaccttcccttggtgaagccatgttggcttgtcccttatgtgcyttaacatgtcatccaggaggatctgttccatgatcttcccatacrcagaggtgaggctcactggccctgtagttcctcaggtcctctttcctgtctttcttgtaaaagggagtgatgtttccctttttccagtccccagcgacttcacctgataatgacgacttttcaaatatgatgaagagcggctcggcagccatatcagccagctcctttaggaccctgggatgcatgtcatccagccctatggacttgtacacatgcactcccatgatttgttcttggacttgctccgcccttaca

SEQ ID NO: 94005 - DNA, 600 bp, Chicken  19866894471418_3
tccacctggccagagagccattaaccacaaccccctggctgcaaccatccaaccaattcctcatcctccaaacagtccatccttcaaatacatctctctctactttagagataaggccttgcagaagtcaagggagatgacatcggttgtcttccctttgtcctccagtgctgtcrctccattgtagaaggccaccagactggtcaggcacaaccttcccttggtgaagccatgttggcttgtcccttatgtgcyttaacatgtcatccaggaggatctgttccatgatcttcccatacrcagaggtgaggctcactggccctgtagttcctcaggtcctctttcctgtctttcttgtaaaagggagtgatgtttccctttttccagtccccagcgacttcacctgataatgacgacttttcaaatatgatgaagagcggctcggcagccatatcagccagctcctttaggaccctgggatgcatgtcatccagccctatggacttgtacacatgcactcccatgatttgttcttggacttgctccgcccttacagtgaagggaaagtttgctcccctgttcccaactagaagttcaggg

SEQ ID NO: 94006 - DNA, 600 bp, Chicken  19866894471427_1
cagccttgtgatccatgtaccaggcacaagcaacatggagagcaaagcacacagtactgtgtgatggttcacaaataaataaatcagtgcgttttgacctgtgcactgcagacccatgggtgtccatggattatatccaagaggtctgtgaaatgtagcaaaggaaacccagttcagatgtattgcaagggatctgcatctccattagagaatatttaagtgtctgttaaaaaagtcaaaccactgaaaagagaggaaaaaaaaatgttataatactacattcgcaaatgattgctgtaytgtagggataaatacccaggagtaaatacacatattatgcaatgctgcgttcaaaataaataaatccttcaaaatcaaagttcgtcataggagctgttgagttacagatgagcttcacagatctgtgtcttttgtctccatagcattgagtctcagcgtctgtcagtgggttattaaccaaaactgaagcggatcccaaccattcagccctgtgttcctagctgggtgtgagaaatggccaaggcttaatgagcccacgccatggctttgatgttcagttgtaacctgagtttgctattc

SEQ ID NO: 94007 - DNA, 599 bp, Chicken  19866894471436_1
  misc_feature (1)..(182): n is any nucleotide
nnnnnnnnnnnnnnnnnnnnnnnnnnnnnnnnnnnnnnnnnnnnnnnnnnnnnnnnnnnnnnnnnnnnnnnnnnnnnnnnnnnnnnnnnnnnnnnnnnnnnnnnnnnnnnnnnnnnnnnnnnnnnnnnnnnnnnnnnnnnnnnnnnnnnnnnnnnnnnnnnnnnnnnnnnnnnnnnnnnnnntgtgtaacgtgattagacattcctattaataaatgcataggtatcagaacacatgctagcaacagagagcttctacaggtacaactctattaacaagagtatgaataaaaaaatattycaaacaatacctacattgaaccaccatcctaatccctctattcaactgaactagaagaacaccatttgaaaatttaagaattctatattttctttgtattaacagagttaagatctatccttttaactgcaaagttaaagcattttcttcttcctgctctcctcttctgcttcattctgcctattatcagtcacaaagcaaaaacaagttctcaactcagaatccattcactgaccatgggaaaaaaaagttgtttctataacatgcaatcttctctttctcctccactgacaagtaca

SEQ ID NO: 94008 - DNA, 562 bp, Chicken  19866894471436_2
acaccatttgaaaatttaagaattctatattttctttgtattaacagagttaagatctatccttttaactgcaaagttaaagcattttcttcttcctgctctcctcttctgcttcattctgcctattatcagtcacaaagcaaaaacaagttctcaactcagaatccattcactgaccatgggaaaaaaaagttgtttctataacatgcaatcttctctttctcctccactgacaagtacatacattctactcattagagatgttcttgacacattctgccttgggctgtgtcaatcagrcaacccattatatcataaaartcttcactctctgctacgtatttcccagccaacgaaacgtaattcacaatgaaagtaatgctctatgagcttcccactgtctgcacaatctaagggggaacacaaccttctacaggctgctggcctaatactacagacatgcaccaacaacttggtacactttaagtcagtaccatgccatttcaaaccacctgtctttttcggtctccttaagggaaaatgaacataactcttgtaaatc

SEQ ID NO: 94009 - DNA, 541 bp, Chicken  19866894471436_3
attctatattttctttgtattaacagagttaagatctatccttttaactgcaaagttaaagcattttcttcttcctgctctcctcttctgcttcattctgcctattatcagtcacaaagcaaaaacaagttctcaactcagaatccattcactgaccatgggaaaaaaaagttgtttctataacatgcaatcttctctttctcctccactgacaagtacatacattctactcattagagatgttcttgacacattctgccttgggctgtgtcaatcagrcaacccattatatcataaaartcttcactctctgctacgtatttcccagccaacgaaacgtaattcacaatgaaagtaatgctctatgagcttcccactgtctgcacaatctaagggggaacacaaccttctacaggctgctggcctaatactacagacatgcaccaacaacttggtacactttaagtcagtaccatgccatttcaaaccacctgtctttttcggtctccttaagggaaaatgaacataactcttgtaaatc

SEQ ID NO: 94010 - DNA, 600 bp, Chicken  19866894471439_1
atatagcttctgttcccttctgcacctctgaaattggtgtaatatgaattagattgtcatcaagtttaatttgtgaagacccataaaacagaaatggctctacatcggtgctaaaacttacgccacttgcattaaatgcatgagtagcaatcagtatttgttaaaacaagtgcttttccagaaatatttaagtaaaatctctaggtgaaatctgagcaaaatttggattggtacctgcaaaaatggtgacctcctcccttctaagttcgattttcctcttgacgatagcccttcacctaratkcctccccaggcagctgtagtgaatggatctggccacagagggaatctggcccaccgaattccttttctttctgtgcaattgaatgaaaagcatgtgtcttttgaagaacagcgactgaaagaaatattaatgactgctgggacatctacagaaaagcataaaaaaattactacagcagggaagacaaaggggctctgttaactctttcttgtaggttgtatatattaatagtaacgaccaaaggttcgtatttttgcagggaaacacacaaggctttgaattgtattgttttaattg

SEQ ID NO: 94011 - DNA, 600 bp, Chicken  19866894471439_2
tagcttctgttcccttctgcacctctgaaattggtgtaatatgaattagattgtcatcaagtttaatttgtgaagacccataaaacagaaatggctctacatcggtgctaaaacttacgccacttgcattaaatgcatgagtagcaatcagtatttgttaaaacaagtgcttttccagaaatatttaagtaaaatctctaggtgaaatctgagcaaaatttggattggtacctgcaaaaatggtgacctcctcccttctaagttcgattttcctcttgacgatagcccttcacctaratkcctccccaggcagctgtagtgaatggatctggccacagagggaatctggcccaccgaattccttttctttctgtgcaattgaatgaaaagcatgtgtcttttgaagaacagcgactgaaagaaatattaatgactgctgggacatctacagaaaagcataaaaaaattactacagcagggaagacaaaggggctctgttaactctttcttgtaggttgtatatattaatagtaacgaccaaaggttcgtatttttgcagggaaacacacaaggctttgaattgtattgttttaattgcag

SEQ ID NO: 94012 - DNA, 599 bp, Chicken  19866894471442_1
  misc_feature (1)..(59): n is any nucleotide
nnnnnnnnnnnnnnnnnnnnnnnnnnnnnnnnnnnnnnnnnnnnnnnnnnnnnnnnnnnacatattctacatccaaacactctgtactggacacatccagcagcatagcttatgtgcacgatttgtgtcatgaaggggagatgccaatactcctcactgatgtgacagtaaagattatggtctgaccaaaacaataggactgaaatcagcaggatttttcatatataatactcctcagggtttgactttttgcctttgaagactaattcttagcatcaactaattaagaaacataggaayataaataatatggtgctggaagaagagttttatctgcagcttggctcatttcagggaagaagagaaagctattttcactgttaaaagacagtagggtatttctgttcagactaaataatttttctttttcccttaaattgaaggttaccatttgggaaaagtaaatctgcagggraaaaaaaaaaaaaaaggaaaaaggaaaaaggaaaaaaagcaagaagcatagctcttacccagcaggctgaagagtgaaagacattggcaaattgtacctcctatgggaaaaagaggaagcagaa

SEQ ID NO: 94013 - DNA, 600 bp, Chicken  19866894471442_2
tatggtctgaccaaaacaataggactgaaatcagcaggatttttcatatataatactcctcagggtttgactttttgcctttgaagactaattcttagcatcaactaattaagaaacataggaayataaataatatggtgctggaagaagagttttatctgcagcttggctcatttcagggaagaagagaaagctattttcactgttaaaagacagtagggtatttctgttcagactaaataatttttctttttcccttaaattgaaggttaccatttgggaaaagtaaatctgcagggraaaaaaaaaaaaaaaggaaaaaggaaaaaggaaaaaaagcaagaagcatagctcttacccagcaggctgaagagtgaaagacattggcaaattgtacctcctatgggaaaaagaggaagcagaacagttgttacaagggtttaaaagatcaaaaagggacctcagtcaagtcttggaagaaaaattattttgtgagtatatttcccctatgggcagctttgtaccctgtcacgcctgtgctatgtgatgttgtgatgaaaggtcatacactctgtgttcagcaacatacaaatctgaaag

SEQ ID NO: 94014 - DNA, 600 bp, Chicken  19866894471444_1
cttagtcctacctttattctaaatagataaaaagaaatttgattttcagtagcctctcaaactcagaattactcttggtatcttatttgtgactgtgctgatgtgctgaaatgctcggacatttgagctgagtgcagtaacgttattataatggttcgtgaatgttacatgaaatggcgttactctattcctaatgttgccttcttatgcattcagggctcatgtttacttccttggctgcagtgttatactgagagctcatgttcgtttgcttttctgttaccccagagttcctacagmgctgcttaaatccagggcactatcttcgacctaatgagcgtgaccaaaactcttgtttgcatgcatgacctgtggcttcactgatttatgctacagtgtgttgatgcaatcctgcatcccccaaagatgcggattagtccgtgcaaccaatgagacccatcaacttttgctaccgtgctggtttggtgaagttgagcagcagtgattttattaactctttcacagtggaaaccgatgtttgcgagcagaacagaacacttcaggattgcactgtgcaccgtgctgttggctggctgcttt

SEQ ID NO: 94015 - DNA, 599 bp, Chicken  19866894471446_1
  misc_feature (1)..(94): n is any nucleotide
nnnnnnnnnnnnnnnnnnnnnnnnnnnnnnnnnnnnnnnnnnnnnnnnnnnnnnnnnnnnnnnnnnnnnnnnnnnnnnnnnnnnnnnnnnnnnntttgctttaaaattatgataaaagctgtgtcacaatagtttcaatcgtttatgagaacacttttatctggaaatcgctgcaaacttttatttctagagggaaggaagttaaaaagtcagcacacagtaataaatgtagggaatagttttgttttgtctacctgcatattcaacagcagctcttcccaagactgtatctaaagtgtrgaaacagatttaaaatatatggtgaaaaaataaactatagaaaatattaagcaaatttagctatacataaaaagtaattattaaaatktattgcaggaaaatacraatgcatatatgaaaaggaatttttcataattattatttttaataggattcagcctcccaaattcagaggtccttaacagacatctacatcttcaagagtagtttactgtraacagtggaagtaaggagcaactctagaatatgatttatcttttctcaagatagatctgaaaaataagtcaaatgaatgattg

SEQ ID NO: 94016 - DNA, 599 bp, Chicken  19866894471446_2
  misc_feature (1)..(6): n is any nucleotide
nnnnnntttgctttaaaattatgataaaagctgtgtcacaatagtttcaatcgtttatgagaacacttttatctggaaatcgctgcaaacttttatttctagagggaaggaagttaaaaagtcagcacacagtaataaatgtagggaatagttttgttttgtctacctgcatattcaacagcagctcttcccaagactgtatctaaagtgtrgaaacagatttaaaatatatggtgaaaaaataaactatagaaaatattaagcaaatttagctatacataaaaagtaattattaaaatktattgcaggaaaatacraatgcatatatgaaaaggaatttttcataattattatttttaataggattcagcctcccaaattcagaggtccttaacagacatctacatcttcaagagtagtttactgtraacagtggaagtaaggagcaactctagaatatgatttatcttttctcaagatagatctgaaaaataagtcaaatgaatgattgtctagaaatgtctgttttctgtctgtaagttcaaaagggatctagctgcctaactcatagaacctttgaattgttaaggttggaaaag

SEQ ID NO: 94017 - DNA, 600 bp, Chicken  19866894471446_3
attatgataaaagctgtgtcacaatagtttcaatcgtttatgagaacacttttatctggaaatcgctgcaaacttttatttctagagggaaggaagttaaaaagtcagcacacagtaataaatgtagggaatagttttgttttgtctacctgcatattcaacagcagctcttcccaagactgtatctaaagtgtrgaaacagatttaaaatatatggtgaaaaaataaactatagaaaatattaagcaaatttagctatacataaaaagtaattattaaaatktattgcaggaaaatacraatgcatatatgaaaaggaatttttcataattattatttttaataggattcagcctcccaaattcagaggtccttaacagacatctacatcttcaagagtagtttactgtraacagtggaagtaaggagcaactctagaatatgatttatcttttctcaagatagatctgaaaaataagtcaaatgaatgattgtctagaaatgtctgttttctgtctgtaagttcaaaagggatctagctgcctaactcatagaacctttgaattgttaaggttggaaaagacctctaagatcatatag

SEQ ID NO: 94018 - DNA, 600 bp, Chicken  19866894471446_4
acagtaataaatgtagggaatagttttgttttgtctacctgcatattcaacagcagctcttcccaagactgtatctaaagtgtrgaaacagatttaaaatatatggtgaaaaaataaactatagaaaatattaagcaaatttagctatacataaaaagtaattattaaaatktattgcaggaaaatacraatgcatatatgaaaaggaatttttcataattattatttttaataggattcagcctcccaaattcagaggtccttaacagacatctacatcttcaagagtagtttactgtraacagtggaagtaaggagcaactctagaatatgatttatcttttctcaagatagatctgaaaaataagtcaaatgaatgattgtctagaaatgtctgttttctgtctgtaagttcaaaagggatctagctgcctaactcatagaacctttgaattgttaaggttggaaaagacctctaagatcatatagtacaactgtcagcccatcaaatgcttatatatcaaatgcctatgtctaataaaccaggtccacatatgctggatctacctccagagatggtgacttcaycayctccctggg

SEQ ID NO: 94019 - DNA, 591 bp, Chicken  19866894471446_5
tagtttactgtraacagtggaagtaaggagcaactctagaatatgatttatcttttctcaagatagatctgaaaaataagtcaaatgaatgattgtctagaaatgtctgttttctgtctgtaagttcaaaagggatctagctgcctaactcatagaacctttgaattgttaaggttggaaaagacctctaagatcatatagtacaactgtcagcccatcaaatgcttatatatcaaatgcctatgtctaataaaccaggtccacatatgctggatctacctccagagatggtgacttcaycayctccctgggcagcccatttcaatgcaytaccactccttctgagatttttttcctactatccaacctgaatttcccctggtgcaatttgagtccattatctttcatcctgtcactaatttcctttgagaagaggttgtacccggggtaacaatcacctccctggtcctttcagctacataatttctgatacaagccaagacactgttggccttggccacttcagcacactgctggctcatgttcagacagttatcaaataacacccccaaatccctctcctccccacag

SEQ ID NO: 94020 - DNA, 588 bp, Chicken  19866894471446_6
tttactgtraacagtggaagtaaggagcaactctagaatatgatttatcttttctcaagatagatctgaaaaataagtcaaatgaatgattgtctagaaatgtctgttttctgtctgtaagttcaaaagggatctagctgcctaactcatagaacctttgaattgttaaggttggaaaagacctctaagatcatatagtacaactgtcagcccatcaaatgcttatatatcaaatgcctatgtctaataaaccaggtccacatatgctggatctacctccagagatggtgacttcaycayctccctgggcagcccatttcaatgcaytaccactccttctgagatttttttcctactatccaacctgaatttcccctggtgcaatttgagtccattatctttcatcctgtcactaatttcctttgagaagaggttgtacccggggtaacaatcacctccctggtcctttcagctacataatttctgatacaagccaagacactgttggccttggccacttcagcacactgctggctcatgttcagacagttatcaaataacacccccaaatccctctcctccccacag

SEQ ID NO: 94021 - DNA, 561 bp, Chicken  19866894471446_7
caactctagaatatgatttatcttttctcaagatagatctgaaaaataagtcaaatgaatgattgtctagaaatgtctgttttctgtctgtaagttcaaaagggatctagctgcctaactcatagaacctttgaattgttaaggttggaaaagacctctaagatcatatagtacaactgtcagcccatcaaatgcttatatatcaaatgcctatgtctaataaaccaggtccacatatgctggatctacctccagagatggtgacttcaycayctccctgggcagcccatttcaatgcaytaccactccttctgagatttttttcctactatccaacctgaatttcccctggtgcaatttgagtccattatctttcatcctgtcactaatttcctttgagaagaggttgtacccggggtaacaatcacctccctggtcctttcagctacataatttctgatacaagccaagacactgttggccttggccacttcagcacactgctggctcatgttcagacagttatcaaataacacccccaaatccctctcctccccacag

SEQ ID NO: 94022 - DNA, 600 bp, Chicken  19866894471455_1
agcatactgtgctgtccagccatgttggtaacagaacagggaagaagtctagaagcaggagcaagaccatcaggaaaaactaaaaactagatggacatcggagacccaattgctctccatcaccaagtggtgatatgacaacagcagtagaccagtacaacttgccttatcatttttcttctccgaaacatgagagaatgtcggttccttaaccacaaagtgtatttttgatcagtattgtctttgcaagaaaaagcatacaacaactgtgcagggcaaatgggtagggtatctaaccayggagacccascaggatggtagtcgcacttcaaattgatactggagggacaagtccccttgtctaggctygaaagataagagcaactctacaggcacccaaaacttgactgacaaagcctgtccaccatgggaccgcaatgccaccctttgtctckccccactatagctggtgcatyctgatagtagagcctcaactgtcagaaaacaaattgtgagcaacagattgaacatgcaactgtgcaaaagcccgtctcaggagggacaattaaaaacacacacggaaaaataaatggctttccc

SEQ ID NO: 94023 - DNA, 600 bp, Chicken  19866894471455_2
gctgtccagccatgttggtaacagaacagggaagaagtctagaagcaggagcaagaccatcaggaaaaactaaaaactagatggacatcggagacccaattgctctccatcaccaagtggtgatatgacaacagcagtagaccagtacaacttgccttatcatttttcttctccgaaacatgagagaatgtcggttccttaaccacaaagtgtatttttgatcagtattgtctttgcaagaaaaagcatacaacaactgtgcagggcaaatgggtagggtatctaaccayggagacccascaggatggtagtcgcacttcaaattgatactggagggacaagtccccttgtctaggctygaaagataagagcaactctacaggcacccaaaacttgactgacaaagcctgtccaccatgggaccgcaatgccaccctttgtctckccccactatagctggtgcatyctgatagtagagcctcaactgtcagaaaacaaattgtgagcaacagattgaacatgcaactgtgcaaaagcccgtctcaggagggacaattaaaaacacacacggaaaaataaatggctttcccgtttcaaccc

SEQ ID NO: 94024 - DNA, 600 bp, Chicken  19866894471455_3
tcaggaaaaactaaaaactagatggacatcggagacccaattgctctccatcaccaagtggtgatatgacaacagcagtagaccagtacaacttgccttatcatttttcttctccgaaacatgagagaatgtcggttccttaaccacaaagtgtatttttgatcagtattgtctttgcaagaaaaagcatacaacaactgtgcagggcaaatgggtagggtatctaaccayggagacccascaggatggtagtcgcacttcaaattgatactggagggacaagtccccttgtctaggctygaaagataagagcaactctacaggcacccaaaacttgactgacaaagcctgtccaccatgggaccgcaatgccaccctttgtctckccccactatagctggtgcatyctgatagtagagcctcaactgtcagaaaacaaattgtgagcaacagattgaacatgcaactgtgcaaaagcccgtctcaggagggacaattaaaaacacacacggaaaaataaatggctttcccgtttcaacccctcttcctcttcagcaagtaacaagacaggagcgagtgcctctatgctagaatgcccag

SEQ ID NO: 94025 - DNA, 600 bp, Chicken  19866894471455_4
tacaacttgccttatcatttttcttctccgaaacatgagagaatgtcggttccttaaccacaaagtgtatttttgatcagtattgtctttgcaagaaaaagcatacaacaactgtgcagggcaaatgggtagggtatctaaccayggagacccascaggatggtagtcgcacttcaaattgatactggagggacaagtccccttgtctaggctygaaagataagagcaactctacaggcacccaaaacttgactgacaaagcctgtccaccatgggaccgcaatgccaccctttgtctckccccactatagctggtgcatyctgatagtagagcctcaactgtcagaaaacaaattgtgagcaacagattgaacatgcaactgtgcaaaagcccgtctcaggagggacaattaaaaacacacacggaaaaataaatggctttcccgtttcaacccctcttcctcttcagcaagtaacaagacaggagcgagtgcctctatgctagaatgcccagaaaatcgacaattaacaagcgttccgctctaccctgtctgcaatttcctcctcacaactatggctaaatgtttaaatacatcattc

SEQ ID NO: 94026 - DNA, 600 bp, Chicken  19866894471455_5
tcttctccgaaacatgagagaatgtcggttccttaaccacaaagtgtatttttgatcagtattgtctttgcaagaaaaagcatacaacaactgtgcagggcaaatgggtagggtatctaaccayggagacccascaggatggtagtcgcacttcaaattgatactggagggacaagtccccttgtctaggctygaaagataagagcaactctacaggcacccaaaacttgactgacaaagcctgtccaccatgggaccgcaatgccaccctttgtctckccccactatagctggtgcatyctgatagtagagcctcaactgtcagaaaacaaattgtgagcaacagattgaacatgcaactgtgcaaaagcccgtctcaggagggacaattaaaaacacacacggaaaaataaatggctttcccgtttcaacccctcttcctcttcagcaagtaacaagacaggagcgagtgcctctatgctagaatgcccagaaaatcgacaattaacaagcgttccgctctaccctgtctgcaatttcctcctcacaactatggctaaatgtttaaatacatcattctcccccaccttctgtgtgctt

SEQ ID NO: 94027 - DNA, 600 bp, Chicken  19866894471456_1
aagcctccttttaattactgaaaggacccgacctcctttttggaattctgtgaatccatacatttgtacatctttttcttcatttttcaaaacatctgtattctctgtagtggtttttatcagaaattatgttgaagtagaggcttacagtgaaataggtcataaatcatttgttttgttatgattgttaaaataggccatatgcttttaattattcagcctcttctcttggggatttggatgaaattcagtgataagcaatccctctttgagagacttaccagacacatggttctaagwagttttctaaaaaaaaatwaaaaaaattgaaagaactagtgaatgtttccatcagaattcttgtattacaggatcttctttttaatatggtctcttctctaattttcttctctcacctctctaaataccaatactttaaaggtggtactcagactgaagactgataaatcttttatatgaccggcttccttactgaaacaaattattcagtttcagcaagaatgagacctacctgaatagttctacattaaatgatcatggtgattatgtatgtacggttatggtttaaactgcgaacta

SEQ ID NO: 94028 - DNA, 600 bp, Chicken  19866894471456_2
gaaaggacccgacctcctttttggaattctgtgaatccatacatttgtacatctttttcttcatttttcaaaacatctgtattctctgtagtggtttttatcagaaattatgttgaagtagaggcttacagtgaaataggtcataaatcatttgttttgttatgattgttaaaataggccatatgcttttaattattcagcctcttctcttggggatttggatgaaattcagtgataagcaatccctctttgagagacttaccagacacatggttctaagwagttttctaaaaaaaaatwaaaaaaattgaaagaactagtgaatgtttccatcagaattcttgtattacaggatcttctttttaatatggtctcttctctaattttcttctctcacctctctaaataccaatactttaaaggtggtactcagactgaagactgataaatcttttatatgaccggcttccttactgaaacaaattattcagtttcagcaagaatgagacctacctgaatagttctacattaaatgatcatggtgattatgtatgtacggttatggtttaaactgcgaactaagggaaattaggcttttcc

SEQ ID NO: 94029 - DNA, 599 bp, Chicken  19866894471464_1
  misc_feature (1)..(23): n is any nucleotide
nnnnnnnnnnnnnnnnnnnnnnnttttttaagccagtttattgaacatacaggcagcaccattggctgctgagatatgtaatcctattccctcctgcagaccaccagccataaagagccggcgggatgtcccactggcccaccagggagttgagagcctccaaaatagatatcacagggaaaggagtggggaaatcagtttactttaaaggaggggattgactcacgtctcagcttaaacccacaataacgctgtgctgaggaaaaataccctgaagagtcagaaagaagatggaacggrcacactttaaaggaaaaaatgaacatctgccaaaataagcaggatatatatatatatttttcctgtcggagagtggtcaaggactctggtatgtgcagaaggttgaatctcaaaatgtaagctgactgcttacattaaagctttaggaggaatcatacagcagttgatgaggctggccacgtgcttggggctcacgccttgctgccctgctccagccacggcttcagcttctcccctgcactgcttctggggcaccacaaccttgtcctaatgctctcacttaatcaaaacatgtgaaa

SEQ ID NO: 94030 - DNA, 600 bp, Chicken  19866894471469_1
tccttctgaagggtgctgatattgcagaacattgccttcaggcaaaaggcatgtattttagatgctttctcagagattttgtgagtgttctctactatatcttgcatcatctctgctcatatgctggcactttcaaacagttttcttaactttatcgtcagatgcagaacttgaaatactgcatgtccactctagggaatttgctgcctgcaattttgatgaggaggaaccattaatgaaatggggaaataactacctttcttagccagtgttttagtaaccatacagtgaatgccacaytgtacaatgcctcaagtctgtgggtttaaatgacatacacagttttgtaaagtatactcctaccctttgtcagtggaaaggaaaccatcagactcatatcctacagtttggaggctgttgttgactatagataagctcacagttggccatgtgcctatcttgagtacataaactgagtactgctaaatcggttatgagctgttcactcattttcactctgggcatgcctcataggccttctctataggggtctgttttggggacagtcttttttggttggagtgatctagaactctttac

SEQ ID NO: 94031 - DNA, 599 bp, Chicken  19866894471476_1
  misc_feature (1)..(54): n is any nucleotide
nnnnnnnnnnnnnnnnnnnnnnnnnnnnnnnnnnnnnnnnnnnnnnnnnnnnnnctgctgagaaattacattagtttattctttgcagcttgcgtatgaactaccgggcctgctcaagctccagaatttgggcagagcctgggctgtggtgagccctgggtcccttccaccacagctcagagctggtgtctggctctcttctgcttcattgcagcagcacttgggtctaggttgacttacttaaacatgctgatcaaagaagtagcacttgagcagccctttctcctctgagttttcccrcatccctcctacttaagaggtattttgtggtgctgtgtggtgtgcatctgtctgcccccctgttctgtaggtaacttcatagcctggactgtcatccttagtgtatatatgtatgtgagtaaataaggccggtagggttttgaaggtcaataattcagacttaactgtttaaaamagcattatattttgggacctttttgcaacaaaattgattcattctccttctatattaggaaacttctgcacttgaaaagtccttgtgtggagctaaaaaaagaaaacaacaaaaagcattcctg

SEQ ID NO: 94032 - DNA, 600 bp, Chicken  19866894471476_2
ctcagagctggtgtctggctctcttctgcttcattgcagcagcacttgggtctaggttgacttacttaaacatgctgatcaaagaagtagcacttgagcagccctttctcctctgagttttcccrcatccctcctacttaagaggtattttgtggtgctgtgtggtgtgcatctgtctgcccccctgttctgtaggtaacttcatagcctggactgtcatccttagtgtatatatgtatgtgagtaaataaggccggtagggttttgaaggtcaataattcagacttaactgtttaaaamagcattatattttgggacctttttgcaacaaaattgattcattctccttctatattaggaaacttctgcacttgaaaagtccttgtgtggagctaaaaaaagaaaacaacaaaaagcattcctgtaatagctgatttgttacaaacacgcaaagagaagagtggtcacttactggctgtaagtgaatccttatgctccttcaaatgaccacaggaattcagagccatgtgtgcttagtgttttacagtttgtccgagttgcttcttaccttgttttattctttgtgcacgtcagaataca

SEQ ID NO: 94033 - DNA, 600 bp, Chicken  19866894471481_1
agtcggttgttacattaagctggctctcattaatagcagccttttttgctgttgtttctgattgcattagtggcaaattctgctctcgtagagattaatgtccaagcacaacctgtctcagaaatgttgccccatggctggggcagggctgaggacactgctgcacggggggggataccaggacagcaggtgacagggcaaaattgccactgaggaatggtgctcgtgctctgggctaactggtgtcctgcacttacagacctcctgctttgggggtgaatgggcacacaactgtggcarggaaactcctacaagacttcaaattgttcattggctgtagagagattcatgatttaaacgtgcttcagctgactgatgaatattgtctcccgaaaaagccattgaagagcatatatgcatttaaaacaggatatagaaaaatatctgcatgcaggcagccccataattttgttgtaaacagatttattctcctatagctcacctgtgctgtaagtccaagtgttgtcatgctcacggcatccaggcagagatgtgtttgcaaactcttatttcagcccccagaagggcttgttaggtgca

SEQ ID NO: 94034 - DNA, 600 bp, Chicken  19866894471495_1
ctgcatcaatatacatcttttatctacacgttccagaaaacatagctaaaacttagaaacatcttaggaatagttatttagagaaaccttccatgaaaagcaagagtagaaaaggcttttctggtacctaatttttacacaacttactcagagcatgaagattcagagttcaaatcttctctttctcttgcacatagtcctaattcaggtcacagtatgacagtactatgaagcaagattatcagaatttgattattttgtgcatcaatgacctcacattttagcatcttaaaactattracatggctccactctaaagataaacaacgatttctagacacaacaacagcttttgtttgcacaaatgctttttactgaatttgaagaacatttgaaaaccatacattctttgtttaaagttacttgccaagaatgagaacaacatttggactacaagtcttagtaacatcattgctgaagaatgaaatgactcccccacctactcaaaaattagaatgctatatgttttaagaaggtaatcttcattgtatgttcaaatctcacaatttacattttctagtggatacatctctattttta

SEQ ID NO: 94035 - DNA, 600 bp, Chicken  19866894471501_1
acgtgctgccttatacgctgcctccagaggggcaaaggtttctgggcccaccaggcagggtctttccctccgtgtgggtttgttgaagatttggtgaaagactaaagatgttggttaaagacccaacggccttcctgctttctgactctcagagcgaacaaaaccaacgcttctttctctaagctcacctttctgttccaattagccccgctttgggggcagctgcagcacagcagcagtttgaatggagcccgcttctctgcctggggaaaggggtcagcattggccgcacgctgcagrctgtcagtgagggagcaacacgagcacacggtgagggagagggtgggcttcaccaagggcaggagggcagcttatttctttttctagaaaagtcattcaaaaattatttccatggtggatgcctcccccacagcctggctacggagagcgttcaacacggaaatgggagagaactgagttttcatttttgctttgcagttcacctttaaagtgaaaggggacttttgtggggctgaatgactcttcatggactttgattccttcaggccctcagcgctcgggttgcagtttcaaggctgc

SEQ ID NO: 94036 - DNA, 600 bp, Chicken  19866894471506_1
accagactataaacaccacaccacaacattctataaaaacatgcagaaagattatgacacaggcaccagataccgtgtctgtatgagtgacacagtaagaaacaacttctttaacaggatgggttaccgctggccttttcctagctactttctgcaaacagaatccctgtaccctctgaaaagaagccaagtagttaaatttaaaatatgcacagagatggtccaagttaaaaatcactgcacaaacattcctatcttccatcttcatatcaggcaaccacaaacattccagcagctgtscagcaacctacatcaggattccattgcagattaaaaatagccttctagccaagttagttctaatccactgaaaagtcattccttgatcagctgatcacaascatcaatattcttgcatctgtgtaacaaagtctcttctaatgcaagagttagcttatgccagcacagaatgcatgtaaaactagggcctaatacaataaatggaataagaagggaaaacaaacaaacaaacaaacaagcaaatgaccccrcaacaaagcaacaacaacaaaacaataattcaaaagccacaaactggta

SEQ ID NO: 94037 - DNA, 600 bp, Chicken  19866894471506_2
acaacttctttaacaggatgggttaccgctggccttttcctagctactttctgcaaacagaatccctgtaccctctgaaaagaagccaagtagttaaatttaaaatatgcacagagatggtccaagttaaaaatcactgcacaaacattcctatcttccatcttcatatcaggcaaccacaaacattccagcagctgtscagcaacctacatcaggattccattgcagattaaaaatagccttctagccaagttagttctaatccactgaaaagtcattccttgatcagctgatcacaascatcaatattcttgcatctgtgtaacaaagtctcttctaatgcaagagttagcttatgccagcacagaatgcatgtaaaactagggcctaatacaataaatggaataagaagggaaaacaaacaaacaaacaaacaagcaaatgaccccrcaacaaagcaacaacaacaaaacaataattcaaaagccacaaactggtaatactgcttatccttgacccagaagtggcttccacctgaagtaygggacaaatcactgctttggcaaatggctagaagctacacctacttccctcatcttg

SEQ ID NO: 94038 - DNA, 600 bp, Chicken  19866894471506_3
ctatcttccatcttcatatcaggcaaccacaaacattccagcagctgtscagcaacctacatcaggattccattgcagattaaaaatagccttctagccaagttagttctaatccactgaaaagtcattccttgatcagctgatcacaascatcaatattcttgcatctgtgtaacaaagtctcttctaatgcaagagttagcttatgccagcacagaatgcatgtaaaactagggcctaatacaataaatggaataagaagggaaaacaaacaaacaaacaaacaagcaaatgaccccrcaacaaagcaacaacaacaaaacaataattcaaaagccacaaactggtaatactgcttatccttgacccagaagtggcttccacctgaagtaygggacaaatcactgctttggcaaatggctagaagctacacctacttccctcatcttgcaacactgtggtaagcaacagaccaggattctgattaccaaaacatattacagcattttaactcacagtaatgccagtaaygtggaacatccagtcccagtttattagtagcttctaatgcagaagtataaagatagtatgccagtcatc

SEQ ID NO: 94039 - DNA, 600 bp, Chicken  19866894471506_4
ctagccaagttagttctaatccactgaaaagtcattccttgatcagctgatcacaascatcaatattcttgcatctgtgtaacaaagtctcttctaatgcaagagttagcttatgccagcacagaatgcatgtaaaactagggcctaatacaataaatggaataagaagggaaaacaaacaaacaaacaaacaagcaaatgaccccrcaacaaagcaacaacaacaaaacaataattcaaaagccacaaactggtaatactgcttatccttgacccagaagtggcttccacctgaagtaygggacaaatcactgctttggcaaatggctagaagctacacctacttccctcatcttgcaacactgtggtaagcaacagaccaggattctgattaccaaaacatattacagcattttaactcacagtaatgccagtaaygtggaacatccagtcccagtttattagtagcttctaatgcagaagtataaagatagtatgccagtcatccctctataaacttgttggtaaaagaatgaggggactggatacagattttcttttttttttttttaaacaaggattatatattctcatgagatt

SEQ ID NO: 94040 - DNA, 550 bp, Chicken  19866894471506_5
tagggcctaatacaataaatggaataagaagggaaaacaaacaaacaaacaaacaagcaaatgaccccrcaacaaagcaacaacaacaaaacaataattcaaaagccacaaactggtaatactgcttatccttgacccagaagtggcttccacctgaagtaygggacaaatcactgctttggcaaatggctagaagctacacctacttccctcatcttgcaacactgtggtaagcaacagaccaggattctgattaccaaaacatattacagcattttaactcacagtaatgccagtaaygtggaacatccagtcccagtttattagtagcttctaatgcagaagtataaagatagtatgccagtcatccctctataaacttgttggtaaaagaatgaggggactggatacagattttcttttttttttttttaaacaaggattatatattctcatgagattactcacatacagccccagttacacaaggatttgctgatagcaagaacacacaagctagacaggagcagtagcagctctgaatgcattt

SEQ ID NO: 94041 - DNA, 600 bp, Chicken  19866894471509_1
taaagcccttttccctgtactctctccttttcaaggggagggcaataaaaatctgtcatcaaaaatccggcctgtggatataactgaaaaagcttcacttagtagaatcagaatgccagcaacacacttaaccaaatgctttagaaaagggaggctgtgggcgtgacacgaaagctgagttccacaacatataaacaattcaggctttaaactgattcatgagagcaaagataatcacttcagaatcttatccttatcttactgaaaactaaatttttaaggaaaacatgtaccagcatmcagccaactttgacttaaaatacattccgatcactcaatatattggaatactaagacaatccttttcaaatagcacaggttttacagatttttatttagaagactaaacattaattgaaaaaaaaaacgtagaatataacttyrttgttagcaaaatccccactccttaagtactgcttaaaagccacgcaaaagagtcatcgtgtaattgtatttctgaygatgaaaaaaaagtctgctcctccactcttcttactcttcaattctgaggatcccatcatgtaaacggattaataaaac

SEQ ID NO: 94042 - DNA, 600 bp, Chicken  19866894471509_2
gaaaagggaggctgtgggcgtgacacgaaagctgagttccacaacatataaacaattcaggctttaaactgattcatgagagcaaagataatcacttcagaatcttatccttatcttactgaaaactaaatttttaaggaaaacatgtaccagcatmcagccaactttgacttaaaatacattccgatcactcaatatattggaatactaagacaatccttttcaaatagcacaggttttacagatttttatttagaagactaaacattaattgaaaaaaaaaacgtagaatataacttyrttgttagcaaaatccccactccttaagtactgcttaaaagccacgcaaaagagtcatcgtgtaattgtatttctgaygatgaaaaaaaagtctgctcctccactcttcttactcttcaattctgaggatcccatcatgtaaacggattaataaaacattttccagcagaacactggtggaaaggaaaagccaaaaggaaactaagcactggccccacatacctcaaactttttttcttcaagtagtaaagcagcaaaacttttaaaaacggactacaaatctatctatatatgtatata

SEQ ID NO: 94043 - DNA, 600 bp, Chicken  19866894471509_3
aaaagggaggctgtgggcgtgacacgaaagctgagttccacaacatataaacaattcaggctttaaactgattcatgagagcaaagataatcacttcagaatcttatccttatcttactgaaaactaaatttttaaggaaaacatgtaccagcatmcagccaactttgacttaaaatacattccgatcactcaatatattggaatactaagacaatccttttcaaatagcacaggttttacagatttttatttagaagactaaacattaattgaaaaaaaaaacgtagaatataacttyrttgttagcaaaatccccactccttaagtactgcttaaaagccacgcaaaagagtcatcgtgtaattgtatttctgaygatgaaaaaaaagtctgctcctccactcttcttactcttcaattctgaggatcccatcatgtaaacggattaataaaacattttccagcagaacactggtggaaaggaaaagccaaaaggaaactaagcactggccccacatacctcaaactttttttcttcaagtagtaaagcagcaaaacttttaaaaacggactacaaatctatctatatatgtatatat

SEQ ID NO: 94044 - DNA, 553 bp, Chicken  19866894471509_4
agagcaaagataatcacttcagaatcttatccttatcttactgaaaactaaatttttaaggaaaacatgtaccagcatmcagccaactttgacttaaaatacattccgatcactcaatatattggaatactaagacaatccttttcaaatagcacaggttttacagatttttatttagaagactaaacattaattgaaaaaaaaaacgtagaatataacttyrttgttagcaaaatccccactccttaagtactgcttaaaagccacgcaaaagagtcatcgtgtaattgtatttctgaygatgaaaaaaaagtctgctcctccactcttcttactcttcaattctgaggatcccatcatgtaaacggattaataaaacattttccagcagaacactggtggaaaggaaaagccaaaaggaaactaagcactggccccacatacctcaaactttttttcttcaagtagtaaagcagcaaaacttttaaaaacggactacaaatctatctatatatgtatatatatgaacataacagcttgggaattatcttac

SEQ ID NO: 94045 - DNA, 599 bp, Chicken  19866894471512_1
  misc_feature (1)..(133): n is any nucleotide
nnnnnnnnnnnnnnnnnnnnnnnnnnnnnnnnnnnnnnnnnnnnnnnnnnnnnnnnnnnnnnnnnnnnnnnnnnnnnnnnnnnnnnnnnnnnnnnnnnnnnnnnnnnnnnnnnnnnnnnnnnnnnnnnnnnnnttgggaacctgggcattaatactggagatttatagtcaaatctgtcacggatggggaagctttttccccaagaattctgcctgaaggtcgctttccctgggcagtaagtgcaaagaaactctctcagccacctcggcccccaggagggggcatacaggggatagagrgatgcccacagagccccagctgcaggctccaccctggctttgggacccccagcccaaaccccacatcctcagcaggttgggctatgcttcagagtacatatatgttcacccacaacagacccagtctcatccatccatgttcagttgggatgagaggtttgcagagcacttctactccctccaagccttccctacacaaggatcaggaagccattgtcgcaggatgtttgatgcatgaggctacatctttccgtgcacaaataccatcaaggagttcatggatgctgctgcttgcttat

SEQ ID NO: 94046 - DNA, 600 bp, Chicken  19866894471512_2
tatgcttcagagtacatatatgttcacccacaacagacccagtctcatccatccatgttcagttgggatgagaggtttgcagagcacttctactccctccaagccttccctacacaaggatcaggaagccattgtcgcaggatgtttgatgcatgaggctacatctttccgtgcacaaataccatcaaggagttcatggatgctgctgcttgcttatatttcactgtcaatgccacgctattatttttgtagagtgactgcttactgcatctccagcagccaacaggtgccgtggaaatyggggtaaaccttgaaaatacagcttcatccagcacattagtaaaaccccacacagtttgtcattcaaggacagtgaaatcacactgcataatctctctactatgggatttccccctaagatttccaaggcattccactggtacaggcaacrtactggtgagctgtgtccaactgctcaaaacagggcacaacggtggaacaattagctcacattcattatccactgcataaactatgttgtttctgttgctaccaaggctgtaggtggcttgtagcagtgggaagtgccaagagagggga

SEQ ID NO: 94047 - DNA, 459 bp, Chicken  19866894471512_3
catgaggctacatctttccgtgcacaaataccatcaaggagttcatggatgctgctgcttgcttatatttcactgtcaatgccacgctattatttttgtagagtgactgcttactgcatctccagcagccaacaggtgccgtggaaatyggggtaaaccttgaaaatacagcttcatccagcacattagtaaaaccccacacagtttgtcattcaaggacagtgaaatcacactgcataatctctctactatgggatttccccctaagatttccaaggcattccactggtacaggcaacrtactggtgagctgtgtccaactgctcaaaacagggcacaacggtggaacaattagctcacattcattatccactgcataaactatgttgtttctgttgctaccaaggctgtaggtggcttgtagcagtgggaagtgccaagagaggggaaaaaaaagag

SEQ ID NO: 94048 - DNA, 599 bp, Chicken  19866894471513_1
  misc_feature (1)..(152): n is any nucleotide
nnnnnnnnnnnnnnnnnnnnnnnnnnnnnnnnnnnnnnnnnnnnnnnnnnnnnnnnnnnnnnnnnnnnnnnnnnnnnnnnnnnnnnnnnnnnnnnnnnnnnnnnnnnnnnnnnnnnnnnnnnnnnnnnnnnnnnnnnnnnnnnnnnnnnnnnagtttgttgttacaactttattttaggcctcttgaagctgtctaggcaacttagtgttttccaccgagtgtgtattgtgctagtccacaccaaagaagtgtgtggagttgttgttattagagttgttgtaggcaatcacagatatcarataagttcatgttgaaatgttttggttgtcacacttgagtagcagagtaggtgtgatatggataatggaataaagatgcctagcaacagggatttcaacaccttgtagttctgttgcacaagctgaatctcctacaggaaaaggtcttcagtacctgcttagttccctgtggcagaacaccaccactcacactggagagatctgtcctttaggggacagatgtaagaatgtaaacctttgtgaaaatttggagagatcaaatgcagctgaatgggattggtagtgccttacagaaaagc

SEQ ID NO: 94049 - DNA, 553 bp, Chicken  19866894471513_2
ttttggttgtcacacttgagtagcagagtaggtgtgatatggataatggaataaagatgcctagcaacagggatttcaacaccttgtagttctgttgcacaagctgaatctcctacaggaaaaggtcttcagtacctgcttagttccctgtggcagaacaccaccactcacactggagagatctgtcctttaggggacagatgtaagaatgtaaacctttgtgaaaatttggagagatcaaatgcagctgaatgggattggtagtgccttacagaaaagctgttctgtcccaaggacaaytgtcttcagccttccttgaaaggcattctgctgtgatactcccaggctcagatgtgtcttaatgtcctgtcaaacatgaaaaaacttgagcaaaacaggccttgagccacattgatgtaaaatatctgcttctccattacagaaacatgctttcatcttaaaaagtgtttaactcagcagtacactgcaagggggatacaagaaatctctctaagatcatgtcgaaatgtgaatgtcttggagtcataccttg

SEQ ID NO: 94050 - DNA, 361 bp, Chicken  19866894471517_1
gatacaaatcaaccataattcaaacaactgtttgaatttattttgatcactttccctataatgggcttcatccagcagaatttaagctttttgggcaggaaatggaaaaaaaaaaagcattaaacagcacctcaaacctgtacatacgaaggaaattacaatctctgcaccacttcatcaccatgaatatactacagacttttaaactgaagttatataaatttcacgtggcaagcttcatatttgctgcacagcaaacactaaataactgtgttaaaatagtacttgagacagtaagamacatcagaacacaaacgaagctctggcttcaggctgctgtatatctttagtttcaactttg

SEQ ID NO: 94051 - DNA, 600 bp, Chicken  19866894471534_1
aagcatcactgcccaaactgttgggagacttccctcctgcaatcatgggaatttgaactcagcttccagcacagaggggaaacaacagcagccccttattctaactattgcccagctgattcctgtcaactcttctacatgacttgtacatgaaactctattccccctattaggctgtgcctgactttcaggagactagacctcgtaattacgttctctccgccagcgcatcagcggtaagattgcttcctcatagatgttgcccctccaacctcttcctgcccctctctccacctgtgytcaggtgcccctcagacccagtgctctgctgttttcaacattttaatgtgacatgggatgcccagagttcctctgactcaattgtagggatgcagatcacccttctgggagtgcgttatcaggatctgacacttttgctgcttggtttgctttccagttcctctccctgtccgtttccacatttgcaatgggaatcttctggcagtgtttttattgctagtagagcaactgaaaggaaaaaaagccctcaaaggctagcctttctgggtggtcccaaccttacaaagacaacattgcatg

SEQ ID NO: 94052 - DNA, 600 bp, Chicken  19866894471538_1
tcctttagttttttaaaaaagatatcagaacttctaagcatctgtatttcttctttccaggaacgctgtcatatctgttagtgggcataatgcagaatcctttaactttttctgcaggtacagtataatttctatacattttttctttgagaaattagacatttgtgattcaaaatgtggactaaatagtatcctccttaacagaagcttaaatagtaggcataactcatgccctaagttttcattactatttatttataattactatttattattttttttaaataataacacctatcmcattaaatgtttgtaggagctaagattgttttctttttaggacatggctaattaaygttactaaaactttaacatatatataacttgtttgaatttgaataatgcttgtttgaattagcagagttaaatattcagggtttattacagtttttgtccttatatatttgaaaatcattgttatatttgattcttgtgtaattagggctctgatctatgtgcaagttactctataagtctaatgcaaacaagaaaatgtgtattttctaaatgcagacttatttttagatcaccttttctcca

SEQ ID NO: 94053 - DNA, 600 bp, Chicken  19866894471538_2
ccaggaacgctgtcatatctgttagtgggcataatgcagaatcctttaactttttctgcaggtacagtataatttctatacattttttctttgagaaattagacatttgtgattcaaaatgtggactaaatagtatcctccttaacagaagcttaaatagtaggcataactcatgccctaagttttcattactatttatttataattactatttattattttttttaaataataacacctatcmcattaaatgtttgtaggagctaagattgttttctttttaggacatggctaattaaygttactaaaactttaacatatatataacttgtttgaatttgaataatgcttgtttgaattagcagagttaaatattcagggtttattacagtttttgtccttatatatttgaaaatcattgttatatttgattcttgtgtaattagggctctgatctatgtgcaagttactctataagtctaatgcaaacaagaaaatgtgtattttctaaatgcagacttatttttagatcaccttttctccagcatttctgtccttattaatatttcttgtgttcaactacatttctgctgattgtct

SEQ ID NO: 94054 - DNA, 600 bp, Chicken  19866894471549_1
tcagtcataaaatactgttcttcccaattataatacagtttaaaggaaaacttattgctctgtggtgtttaatataaaatgtgtttatctgaccttcatttacgtgggctgcagacttatctttaatccctccagaactgtggcaggaagagaagccaccaacaaaaactgtgcagcatcctgttgtggctgttcaattgcttgggcctcttggtattctctgggtgctcctcgctgtcccctggatgatgggcatgacttggccccatgtccctcccaggacagtaagcatgccactcyatcaaaacattcactagtttgattggaaaagtagtcgacccyttcctcgctatagtctcttctgagtcattgtaaagagtgtatctgacaccttttgaaacagggataagtatgtgggtcttcccatcatagaagaatcaatactcagcttccctgcactcctcaggttggatcctctcactttctgaagaatttgttcaaatgcattgagctggtgctgttttattgtaattaaatacattagtagtgccagattctgaatctcagtttaaaacagttttaataatgtgggggcttcac

SEQ ID NO: 94055 - DNA, 600 bp, Chicken  19866894471549_2
aaggaaaacttattgctctgtggtgtttaatataaaatgtgtttatctgaccttcatttacgtgggctgcagacttatctttaatccctccagaactgtggcaggaagagaagccaccaacaaaaactgtgcagcatcctgttgtggctgttcaattgcttgggcctcttggtattctctgggtgctcctcgctgtcccctggatgatgggcatgacttggccccatgtccctcccaggacagtaagcatgccactcyatcaaaacattcactagtttgattggaaaagtagtcgacccyttcctcgctatagtctcttctgagtcattgtaaagagtgtatctgacaccttttgaaacagggataagtatgtgggtcttcccatcatagaagaatcaatactcagcttccctgcactcctcaggttggatcctctcactttctgaagaatttgttcaaatgcattgagctggtgctgttttattgtaattaaatacattagtagtgccagattctgaatctcagtttaaaacagttttaataatgtgggggcttcactatgtcctcagtattgaagcagaactccctatcttttacaat

SEQ ID NO: 94056 - DNA, 356 bp, Chicken  19866894471567_1
caagaaggcaaggagcaaacagcacaaactggaacagaaatatgaggaaaagctttttcacagtgagagtgacagagcattgggacaggctgcccagagaggtggtggagtctcctccgcagatattcactatcaacctggataatcttctgtagggaacctgctttagcagggaggttggactcgatgatctccagaggttccctcccagtttcatgattcctatatggggcagtatcagcagccactccaataaacagggaagcctcctcgcctcgtgctgctcttctgtgactcagraaaatgaacagaaacatcccccagttcaggcagttagcatacagctgcagccctca

SEQ ID NO: 94057 - DNA, 600 bp, Chicken  19866894471571_1
gggcagtatgataaaatggcatatgacataaaaacacacatgaagcatcagtgaggaactgaattcctctgtgcagaaaaaatggcacccactgacatttcattgatgctcgctgaatatttctggggaaagagcagtggatgtgagcacagcgaggcagtgggtggtgtgtttcagcagtggcgacagcaacagtggtcacctctgatggtgcacgtttttatgagcgcagcatgcaggctcttgttcattgctggcaaaaatgaatagctactggcagtaactatttgtaaagtcacrtcttgcggctgagaatctgctctatcacacagcgttactgtgctctttctatctgttgtagtttccatggaaataaataggaggcattacttttggagtgacctgcgtatttcagtacattgaccgtgcagaagactcacgttgtcatagaggacacttctactacaaatttaagccttaaattgagatatatattttggagcgtctttcatccattcatgttaatattcttttatttatatcatctggcttcaaatccttaccagcggtgtggagcagctatctctgggcagctcatat

SEQ ID NO: 94058 - DNA, 600 bp, Chicken  19866894471576_1
tgtccgttacctatacgtacaatactgttcttttctaagagagcttgtgtacttcctccatttagatgaataatgagaattgtatgagcacttaaaatctcttccattaagatggcatcgtattacaaggagaatcaaagacactctttaattaatggaaaagcattgctataccacttaattataaatttaaaaagttcacacatccagataatggcccctggtagtggaatgtgatcttccagtaagtatcattttgataaacacatagccactttgggcattgcaagacaagctgcmtctgattctcttctcattcctggggtcttatgcactagcctcgcttcttgctcctcacccttatgtccatttcttccagatggtcagccataatttgccattcatgtttgcacaaaaggttcacctccaagcacaacttctggcaatcgggatagcaagtgtgtaaaatgggttgaagtgacctcaaaccataggttacccacctggcagtgacaggcacattgcagaaacatgagctgtttatcctgtatctgtccttggagccagaaacatgcaaaatttgacgcaaagcttatgccc

SEQ ID NO: 94059 - DNA, 599 bp, Chicken  19866894471582_1
  misc_feature (1)..(100): n is any nucleotide
nnnnnnnnnnnnnnnnnnnnnnnnnnnnnnnnnnnnnnnnnnnnnnnnnnnnnnnnnnnnnnnnnnnnnnnnnnnnnnnnnnnnnnnnnnnnnnnnnnnnttgcttattggagagtcctggggtttgaccacccacatggatcaagctcaagaattttttgaggttcacctatcagtttgtgagacaacagggcaacaaggtgtagaagtgagctcggttgttctcagctacaccatttgtaagattcaacatcccataatcctgtatttgcaaactttctctgttgttgagggtggtakgcttgagccaagggaagcatacaagattacaggatggagagtggtgtctttctagaataaatgtaaactttttcttccttkaattaatccttcaatgaatattaagagatcagcrcygaccacaggcttgcatctggttgattcaaggccttgattaaactcatattatcagtctgggctacatcaagcaggagggcacagccacaaggactgcataaagagctgtcttttactgcagtttcacctgggtttcccagctggaagcctggagaggtgcctgcagggagatattgctttgc

SEQ ID NO: 94060 - DNA, 599 bp, Chicken  19866894471582_2
  misc_feature (1)..(19): n is any nucleotide
nnnnnnnnnnnnnnnnnnnttgcttattggagagtcctggggtttgaccacccacatggatcaagctcaagaattttttgaggttcacctatcagtttgtgagacaacagggcaacaaggtgtagaagtgagctcggttgttctcagctacaccatttgtaagattcaacatcccataatcctgtatttgcaaactttctctgttgttgagggtggtakgcttgagccaagggaagcatacaagattacaggatggagagtggtgtctttctagaataaatgtaaactttttcttccttkaattaatccttcaatgaatattaagagatcagcrcygaccacaggcttgcatctggttgattcaaggccttgattaaactcatattatcagtctgggctacatcaagcaggagggcacagccacaaggactgcataaagagctgtcttttactgcagtttcacctgggtttcccagctggaagcctggagaggtgcctgcagggagatattgctttgctttgaatattcctgtcctttgctgtggtaagttgttttaatattgtccaggaattgcaactatttcaaggggaagatgtga

SEQ ID NO: 94061 - DNA, 600 bp, Chicken  19866894471582_3
tcctggggtttgaccacccacatggatcaagctcaagaattttttgaggttcacctatcagtttgtgagacaacagggcaacaaggtgtagaagtgagctcggttgttctcagctacaccatttgtaagattcaacatcccataatcctgtatttgcaaactttctctgttgttgagggtggtakgcttgagccaagggaagcatacaagattacaggatggagagtggtgtctttctagaataaatgtaaactttttcttccttkaattaatccttcaatgaatattaagagatcagcrcygaccacaggcttgcatctggttgattcaaggccttgattaaactcatattatcagtctgggctacatcaagcaggagggcacagccacaaggactgcataaagagctgtcttttactgcagtttcacctgggtttcccagctggaagcctggagaggtgcctgcagggagatattgctttgctttgaatattcctgtcctttgctgtggtaagttgttttaatattgtccaggaattgcaactatttcaaggggaagatgtgaaagaaaaaaatctttttctgctggcgacaaaacta

SEQ ID NO: 94062 - DNA, 600 bp, Chicken  19866894471582_4
ctggggtttgaccacccacatggatcaagctcaagaattttttgaggttcacctatcagtttgtgagacaacagggcaacaaggtgtagaagtgagctcggttgttctcagctacaccatttgtaagattcaacatcccataatcctgtatttgcaaactttctctgttgttgagggtggtakgcttgagccaagggaagcatacaagattacaggatggagagtggtgtctttctagaataaatgtaaactttttcttccttkaattaatccttcaatgaatattaagagatcagcrcygaccacaggcttgcatctggttgattcaaggccttgattaaactcatattatcagtctgggctacatcaagcaggagggcacagccacaaggactgcataaagagctgtcttttactgcagtttcacctgggtttcccagctggaagcctggagaggtgcctgcagggagatattgctttgctttgaatattcctgtcctttgctgtggtaagttgttttaatattgtccaggaattgcaactatttcaaggggaagatgtgaaagaaaaaaatctttttctgctggcgacaaaactatg

SEQ ID NO: 94063 - DNA, 600 bp, Chicken  19866894471588_1
tgcaaacaagctgacagaggcagtatggcagtgggacagggtgttcaataaccccactacaaattgattaagggagaaaacccactggccagactggctagctaggaaagtggaattgcactatgtgatttcttgctataactaaactcttctgcattggctaaactggggttaagtgctgcattccttgtttcgctgcagtacagcttgtatattgtatactggtctccataatactttcgaatcttcttgtactataatgagcctcctgacatgctggtagcattacattctcttggraatttataaagcaaattaaaaatcttgacagagttggaatgtaaaattgaatttcattcaggatctgaagttttctgatttacacacacacctaattgaggtaacaggtcagttcttaagctgaaaagagggataagcagcagttcccactctgtgtcagccgtagtgtcttgtgcttaggagtgcttatcctttccctctttcagtttgttagaacagaaacctcagtctgagagggttgggcttggctgtgatcaccacttctttcttttcaattttggaggctgtgcttaacagacc

SEQ ID NO: 94064 - DNA, 600 bp, Chicken  19866894471594_1
tactgttgttctacttaaaattcagaggacagttcaactccaattcacatgttttggggaaactccagcagaaaacttcacccccttaaacgtgctacattagatatctcaagtacttaaaagtaaaatgtttcaatacagcagactcaataagtttctctcatcaagtggaatgttattaccatttaattcaactttgcttagaagttcactgaaccttcctatcttgcatcaactagtgttcattaatttaaaacattctaacacttgtgtacatgcagacatgtagtgtaatagatkaagtatttgtttttaaactccttgaagatgctgagacaatatattcataatctatccttgctcatgtttatcccataagaaagccatttgagtcttctggtattctgcagttaggagagaaacgaaagatatgatgtcaggaaaataatgcagcagcttcagaggaatgagcaatatcatgctggaactgagaccctcattcaaaatgaggtctctttgctgttgcaattattcagcagtttcttgaggatgctatacaaataccctattatttcatctagcttatggattgcaatggca

SEQ ID NO: 94065 - DNA, 599 bp, Chicken  19866894471603_1
  misc_feature (1)..(113): n is any nucleotide
nnnnnnnnnnnnnnnnnnnnnnnnnnnnnnnnnnnnnnnnnnnnnnnnnnnnnnnnnnnnnnnnnnnnnnnnnnnnnnnnnnnnnnnnnnnnnnnnnnnnnnnnnnnnnnnnntatttgattcttacttcagttcagtcacatattgccaaaaaaaacctggggacaccccttgtgatttctttttacttctcacccacactgttcctttgtagcacactctcttgactaggtgacatctaatataaacacggttgtgtagcaatataacaatacctattgtcttagaaatccacaaacrttctacctagatatctatagacaaaattttttttctcagagaaatcagtatgatttctacaaaggtatgaagcatgagtttgaagtaaaacaggaatgaattagcaaaggtttggataatttccatttcaaaattgttgggcctaatatactgaaatgctagaccacataagattatgatgaacaaagcttaaaacagaacactaatttttaattaaatcttggaaccacagatagatgtcattggaaaggtgtctccaaggtgagacagaagactcagaagggacaaccatggtgtcc

SEQ ID NO: 94066 - DNA, 599 bp, Chicken  19866894471605_1
  misc_feature (1)..(73): n is any nucleotide
nnnnnnnnnnnnnnnnnnnnnnnnnnnnnnnnnnnnnnnnnnnnnnnnnnnnnnnnnnnnnnnnnnnnnnnnntgagggaaaagtggcagatttatgatagcatataatgatatatgattatgttactataatgagctaaataactacaaaccacaagaggaaagtttagcagctcattactgtggcagaaacaaatgcatagacagaacaagttttgaaccacttaaataaattgactttattccttaagagaaccacatttcctttagaatgaattgttgctttctaagcattatgcwgtaggttttgaaaaagtaataattttccactttggccatatgttgaagtattactataaattcattatggaattggtcattcaaaaatcaattttgattagcagcctttgaaatcaattgatctgtaacctgtatttagctctgcttgctctaagtcttttttgcatctgagttcattaataacacatttttctaatggaatctctagagatttgtgagctttgaatttctgctgaaacaggaatgctgtgtaagtttagctgtagaagtaggcgcctgtatagaagcatataaatcct

SEQ ID NO: 94067 - DNA, 600 bp, Chicken  19866894471605_2
aaagtaataattttccactttggccatatgttgaagtattactataaattcattatggaattggtcattcaaaaatcaattttgattagcagcctttgaaatcaattgatctgtaacctgtatttagctctgcttgctctaagtcttttttgcatctgagttcattaataacacatttttctaatggaatctctagagatttgtgagctttgaatttctgctgaaacaggaatgctgtgtaagtttagctgtagaagtaggcgcctgtatagaagcatataaatcctggggatctgcagktttcacaagacagcaagccgcatcaagctggtagcagaaatactgataacagaaggataataagctgcaatatttctgtgtttaagcctggttgtgttaagatcacacggaaatcagtatatgctgaaagaatttggcaggctgtagaatcctctagttggttatacctgataggcttttttctccggaattttatgcaatctgaaggacttaatttatctgtacatccatgtgaatgacataagatggcatgtaatagacatattccaatcatctgttcattacatcattcattttaaa

SEQ ID NO: 94068 - DNA, 600 bp, Chicken  19866894471606_1
gctgctgaaggtcctgacctgggcgcttccacagaggcaacaaaggaaactgagactgatttgtctctgagacttcctagtcccacatagagaaaactgctaggcaaatgcatatggaaaaatacatatggtaaagtaaacaggataaaggcttttatatggataatagtttccctattactgtattatatgggtaattcagtaatgctggtttttgttggttggttggactatgagtgaaatactttacttctgattcccctaagtgaaactgtttccaaaaaactgtcatagcccccraagaactccacagtaatcttaagcatgcttatttacagaaatcagaactgatttctgcagacatagaattgcccttgagaaatccctaagccagtgcttacttctgattctgaagagaccataatcttcgaattagatgtgtgtggaaactcatgaacaacagcctacacttcagtctaaacattttttcatcccttaccttcgttccatgatttcttttctcatctccttacatatacagtcttgatgtattaacacgtaacagagattcaggagtagttctgcaaaacagttgccagg

SEQ ID NO: 94069 - DNA, 600 bp, Chicken  19866894471616_1
ttacaataaatgcccccagcataaaacaattatgtacctgctattgtcaaaaacattcaacattccctttgttgaaaaggaaacagctataaattattcactagggcactgaaacccttttctttttttctttctttttttttctttttttttagttgcttccaattaatttttccctgaacatccctaggtatttagctgagggtagaaatttacaatgcaaagagttttagctgttccttgggactgtcagacccagtgtccaaattaaaaataataaaaaagtttaccatatttttytgtcgataaccagagttcmgttataaaaatataattcaaggttggcataccttatatgtgtttgagggtaaatataatcttttaacccagggatcctctcagtcccagtaactccccagtatccaccatcctcaactctcattctcatttcagaatttatcccaacctcatgctttctttatttccttcatggcatttttttgtggtttattactgaatacagtcttcccgatgaaatactgaaatcctgaaaattttcaagaaacacttttaaaaagaattactgaaggtgcagattgt

SEQ ID NO: 94070 - DNA, 600 bp, Chicken  19866894471616_2
cataaaacaattatgtacctgctattgtcaaaaacattcaacattccctttgttgaaaaggaaacagctataaattattcactagggcactgaaacccttttctttttttctttctttttttttctttttttttagttgcttccaattaatttttccctgaacatccctaggtatttagctgagggtagaaatttacaatgcaaagagttttagctgttccttgggactgtcagacccagtgtccaaattaaaaataataaaaaagtttaccatatttttytgtcgataaccagagttcmgttataaaaatataattcaaggttggcataccttatatgtgtttgagggtaaatataatcttttaacccagggatcctctcagtcccagtaactccccagtatccaccatcctcaactctcattctcatttcagaatttatcccaacctcatgctttctttatttccttcatggcatttttttgtggtttattactgaatacagtcttcccgatgaaatactgaaatcctgaaaattttcaagaaacacttttaaaaagaattactgaaggtgcagattgtacaacaactgtgaaaacaa

SEQ ID NO: 94071 - DNA, 599 bp, Chicken  19866894471622_1
  misc_feature (1)..(58): n is any nucleotide
nnnnnnnnnnnnnnnnnnnnnnnnnnnnnnnnnnnnnnnnnnnnnnnnnnnnnnnnnntctcttatgtatggagaaaatattcctgaacccactggtgaagtatccattctcattattgctggttcacatctcaggtgaaacttactgctcctcattggtctgttcaagtagtagggtttacaaggtttgtcattctttatgttgcaaatttgtagatgtggtattgttaggccaagaaattacattaaaatcttccagttctgtcactttagtagtgttctttcaaagggagcgtggtrcttctttttgcctccccaaccccttgcctccagtattttttcttgactgttctgtcctcaccagcctgttttctcacaggttttctaaatggtttctaaatgtgctgtaaaccacacagcgttattgttggtctccttttgtacttcatgcggttcagatcttcatatccatgttgtggataacttaagaggaaattacatgttactccaagtaggatcttcatggctctgggaaaaacagcttaaattgtttctctcttacaacactcccaataacgtaccttcaaagaaaaactggt

SEQ ID NO: 94072 - DNA, 600 bp, Chicken  19866894471622_2
tgcggttcagatcttcatatccatgttgtggataacttaagaggaaattacatgttactccaagtaggatcttcatggctctgggaaaaacagcttaaattgtttctctcttacaacactcccaataacgtaccttcaaagaaaaactggttgaaggaactttctggccaaggtgaatccccaggaaaaaaagtagttagttgaatcttttttaagtcagtgcttttaggttacagtcaagtgtgtgtggaggatcagcaatgcacagccacaatgcaggaagggggtggcaggactgcwgctgcgtgggctggcatcacctctgggtgttgtggaactgccctttagctgttcacctcttccaagaggaaatgacgctggtctgtctttccccctaaataagtcgaaccaacctcccctgtcagttttgttgactggtggaagcgaatattgcatttaatgcattctgcttatttttatcactgtgaaattcaaactcatttgcttcccctgttcttactactgctgaatgaacaaaacattttctctttgtgttctctaggtacgtttctcgtacatgcggatgaagtatctcttcat

SEQ ID NO: 94073 - DNA, 600 bp, Chicken  19866894471630_1
cgacacttggccctattgaaactcatacagtttactttggcccgttgatccaggtcctctgtagtgcctttctcccctctggcagatctacactccctcccagcttggagtcatctgcaaacttactgagggtgcactcaatcccctcgtcaagatcgttaataaagatattaaatagaagtggccccagtaccaagccctgggggacaccactcgtgtctggctcccaactggatgtacctccattgaccacagctctttgggcccggccatccaaacggtgtttcacccagcagagcrtatgtccgtctaaatcatgggcagccagctactccacgaggatgttgtgggagatagtgtcaaaggctttactgaggtccgggtagaccacactgacagcattaccttcatcttaccttcatggacctttaattggtccatgatgactcctgagattatccattctataaccttccctggtactgaggtgagactgataggtctctagctatcaggatcatctttccagccctttttgaagatgggcgtcacattttgccagacttcagtccaccaggacattcctggttagccaggact

SEQ ID NO: 94074 - DNA, 600 bp, Chicken  19866894471630_2
aaagatgatggagggtgggtttggtaaccacatccaccaactccctcagcattctagggtgcaatccatctggccccatagacttgtgagtgtctagctttgggagcaggtccaaaaccatctcactgtggattatgcagggcctgttctgttccccatccctatctaccagctcaaggggctgtgttcccagggaataacaagtcttactattaaagactgaggcaaagaaggtgttaagtacctcagccttatcctgatccttggtcaccatgttgccctcagcgttcaacaagggayggagattctccctagccctcctcctgctgttgatgtatttatagaaatattaattattgtcctttaccttagtggmcaagttcagttctagctgggctttgccttttctaattttcttcctgcacagcttcactatgtgcctgtaatcatcataagctacttgcccactcttacagagaccataaactttccttttgctcttgagttccagccaaaggttcagccagtctggcctccttgcccatcrgctcgtcttccatgacttggggatggtcagctcctgcacctttaaaattactt

SEQ ID NO: 94075 - DNA, 600 bp, Chicken  19866894471630_3
catagacttgtgagtgtctagctttgggagcaggtccaaaaccatctcactgtggattatgcagggcctgttctgttccccatccctatctaccagctcaaggggctgtgttcccagggaataacaagtcttactattaaagactgaggcaaagaaggtgttaagtacctcagccttatcctgatccttggtcaccatgttgccctcagcgttcaacaagggayggagattctccctagccctcctcctgctgttgatgtatttatagaaatattaattattgtcctttaccttagtggmcaagttcagttctagctgggctttgccttttctaattttcttcctgcacagcttcactatgtgcctgtaatcatcataagctacttgcccactcttacagagaccataaactttccttttgctcttgagttccagccaaaggttcagccagtctggcctccttgcccatcrgctcgtcttccatgacttggggatggtcagctcctgcacctttaaaattacttccttaaagtattcccagcctttctgggctcccatgccctccaaaactacttcccaagggaccctctcaaccatggt

SEQ ID NO: 94076 - DNA, 600 bp, Chicken  19866894471630_4
agccttatcctgatccttggtcaccatgttgccctcagcgttcaacaagggayggagattctccctagccctcctcctgctgttgatgtatttatagaaatattaattattgtcctttaccttagtggmcaagttcagttctagctgggctttgccttttctaattttcttcctgcacagcttcactatgtgcctgtaatcatcataagctacttgcccactcttacagagaccataaactttccttttgctcttgagttccagccaaaggttcagccagtctggcctccttgcccatcrgctcgtcttccatgacttggggatggtcagctcctgcacctttaaaattacttccttaaagtattcccagcctttctgggctcccatgccctccaaaactacttcccaagggaccctctcaaccatggtcctaaagaggctaaagtctgccctctggaagtccacggtggcagttctgatgactcccctccgtggttcaacaaggattgagaaatctagcatctcatgatcactgtgccccagacggccttcagcctttagattccacacaacaccttctctgttaagaaacagcaggtc

SEQ ID NO: 94077 - DNA, 599 bp, Chicken  19866894471634_1
  misc_feature (1)..(77): n is any nucleotide
nnnnnnnnnnnnnnnnnnnnnnnnnnnnnnnnnnnnnnnnnnnnnnnnnnnnnnnnnnnnnnnnnnnnnnnnnnnnntgtgagaggacttctttccaaaaaaaacaaaaaacaccatttctgaagtcaaatacaattacttaataacctgatttcagtgaatgctgatgggacccctttcttgaattttatggaatatgtttatggatagaactccagatttattatctttaccctaaattgtcctgaagtacttatttaacaaattgatatcaaaatcataggaaagaatcatgtaacmatcactggaaggctgttctgcctgatacaggacaagtcaactgctatgagggatcatagcagttcacaacagatttaactctttacaagggtagataactgcaggacaagggggaatgcttttaagttgagggaggaaagatttaggctgcatgtcagaaggaagtcctttactatgagaatgrtgaggtactggaatgggctgctcagagtggttgtggaagccccatccctggaggtgttcaaggccaggttggatggggtcctgggcagcctggtctaatattaaacatggaggtt

SEQ ID NO: 94078 - DNA, 426 bp, Chicken  19866894471634_2
tgtgagaggacttctttccaaaaaaaacaaaaaacaccatttctgaagtcaaatacaattacttaataacctgatttcagtgaatgctgatgggacccctttcttgaattttatggaatatgtttatggatagaactccagatttattatctttaccctaaattgtcctgaagtacttatttaacaaattgatatcaaaatcataggaaagaatcatgtaacmatcactggaaggctgttctgcctgatacaggacaagtcaactgctatgagggatcatagcagttcacaacagatttrtgaggtactggaatgggctgctcagagtggttgtggaagccccatccctggaggtgttcaaggccaggttggatggggtcctgggcagcctggtctaatattaaacatggaggtttgtggccctgc

SEQ ID NO: 94079 - DNA, 600 bp, Chicken  19866894471635_1
gagtgctttgaatgtagaggctctgtgcatttgttttatttatttactttgtgagaacactcttcatagacaaagactaatatgccaagagccatatgcacacaatgctgcagtttattctgtatcatgccactagtttcccaatttaatgtgcgggattttatcacaagaccttcaacatggcctacagggtcccttgcaggcacaagtttagatgtgtgcttgaagggcaactggagttaaaatacaacaggcagtagaattacctatacctgcatgaaggagaggctttcagaccaytttttctctcccgragcgcacacagctcctctggggtcaggtttgctcacatgttgtgaaggcttccagcagcactactgcagcctgtgaggcttggagcacactgtggggctcaccacaacactgggaagagcagcactcttgttactgagaatgtcctgatgctcaacagcacaagagctgctaggttaaaatcctattttaatccccttgttgggtgaatccacacaggagcagaaggaagctctccatcactgttatagatctcatctcatgggacaaggtagggcaagtaaatca

SEQ ID NO: 94080 - DNA, 600 bp, Chicken  19866894471635_2
tagaggctctgtgcatttgttttatttatttactttgtgagaacactcttcatagacaaagactaatatgccaagagccatatgcacacaatgctgcagtttattctgtatcatgccactagtttcccaatttaatgtgcgggattttatcacaagaccttcaacatggcctacagggtcccttgcaggcacaagtttagatgtgtgcttgaagggcaactggagttaaaatacaacaggcagtagaattacctatacctgcatgaaggagaggctttcagaccaytttttctctcccgragcgcacacagctcctctggggtcaggtttgctcacatgttgtgaaggcttccagcagcactactgcagcctgtgaggcttggagcacactgtggggctcaccacaacactgggaagagcagcactcttgttactgagaatgtcctgatgctcaacagcacaagagctgctaggttaaaatcctattttaatccccttgttgggtgaatccacacaggagcagaaggaagctctccatcactgttatagatctcatctcatgggacaaggtagggcaagtaaatcaacagaagcactgtt

SEQ ID NO: 94081 - DNA, 599 bp, Chicken  19866894471638_1
  misc_feature (1)..(144): n is any nucleotide
nnnnnnnnnnnnnnnnnnnnnnnnnnnnnnnnnnnnnnnnnnnnnnnnnnnnnnnnnnnnnnnnnnnnnnnnnnnnnnnnnnnnnnnnnnnnnnnnnnnnnnnnnnnnnnnnnnnnnnnnnnnnnnnnnnnnnnnnnnnnnnnntctttgcatcatctacaggaaggaacactatttcatgttgttgcactaacagacttttgtacagctgccaaaatgcaaacaagtttaactaaactgtaatccagaaggaaaaaacccagtctcaatgtaattattcctgtttactatgtcacttartccccctcttctatcctttgtgagaaagaaatcagcaataaaaggagcctacttcacagttgtatgcagtgtgagcctcgctaatattttgacattaatcctactcattttccattcccctgattcctcttcttactcaaagccctccacagttatcatctgtcaagcctgtatgccctcggtaccatcttccagtcaaactaagggcttggttttcttttaatttttcatcgtgcacatccaaaagatttaacaatttgacctattccaagatgcacaggcagcactaaagtcttctg

SEQ ID NO: 94082 - DNA, 600 bp, Chicken  19866894471656_1
ccgggtgaggatggccacgtggggaagggttagtgacagcagatgtgagggggagtagaggattcatgctcagtgcatcatttatgccaggctgcaaccagtcctaggtgccagctacactacactcttagccagagtctgcaggagaaacggtaagcattaacagctccagcagccctcaagccaagcatccaccagcaccatgctcacttgttgcctcttttccatcctcctcattgcagaaaccacctgtcccagacctggaccgctaccttcctccaaactcagtactagtgaccrcagtgcccttcagtctcagagcaagcacagtaggcttgggtcaccctgcatgagcctcagctaacagcagcctcttttgccaccgccggtcagcccagccaggcaccccaagaaaacctgccttttccaatctctgcttggccagagtctacaggaagggcacaagaccacaaaaggacagtaaaggtgttggctgtggactatttccttacattacagtcacagccccaccaagcacacacgcacgcgcacacacacacaccttcccagacccagcatcacctgtggcgcactgcagga

SEQ ID NO: 94083 - DNA, 600 bp, Chicken  19866894471661_1
cctttcatcattgtaaattaacccttaagatctgtctgttttgtgttcctttttgatgctgaaggatgaggttcataccacactgtttagctatactactactttagtagctttattcaatcagttattaaacttttacatttttggtaataatataaaggtcagcagcttctgtgtaagctcctttaaacttattcaaggcagagtgcagtatatgacatggtttctgtctttggatttctaatttcccatcccagcagcctcaggaaaggaaggagtagcgagttcaattcgtccttytgcacatgccactaagagtgagttcagaagagaagttccagtagcaaagcgcgtgcatctgaaatgctggcttcctctcctagtaacagtgaagccgtttggctttctgacttctgccaaatgttacgctgattcaaagaaccatccacacagagctgagcaacatcagtggtattggcagaaatactcaatgtctcttgctccaattaaaagtgtttcagtgacacaaaatctcttaagtgatttttgtgcataacctcgttccttttttacttggcgtttcaaagagttagcttaagc

SEQ ID NO: 94084 - DNA, 600 bp, Chicken  19866894471663_1
ttaggaggtcttggacaatgcaagctggaaactgaacacgtgatatgggcccttgccttgctgctggaagataagtgctctgtgatctgaagcagtgagaagctgaccttgttatcagcatgcacatctcgggtgctttacacagctgtttatccaaagctgatgtttatatatgtaggttcataaagaagggaatcttgggtggaattaaaactgaatatgtactctgcacctcatagaatcatcgaacagtatgggtcggaagggaccttaaaaaccacttagcaccaatcccctgcygtgggtagggatgcctatctctgcattaggcaggacagaacatcaggacatgaggtgggatcataacagggacaaaacagtggtggttgctgttctggggaaataaagcatgcactgagcagtcaggggatgacttatccctagcaagggttttcttctaagccccaaaagctgcaggttggttcgtgaccccargctacagcgtatacaccccttcctaagacccggttattttttaatgttacagctcagaatgtctcacctactcmttttactaacccaaatcctttctcaggaccc

SEQ ID NO: 94085 - DNA, 600 bp, Chicken  19866894471663_2
tcttgggtggaattaaaactgaatatgtactctgcacctcatagaatcatcgaacagtatgggtcggaagggaccttaaaaaccacttagcaccaatcccctgcygtgggtagggatgcctatctctgcattaggcaggacagaacatcaggacatgaggtgggatcataacagggacaaaacagtggtggttgctgttctggggaaataaagcatgcactgagcagtcaggggatgacttatccctagcaagggttttcttctaagccccaaaagctgcaggttggttcgtgaccccargctacagcgtatacaccccttcctaagacccggttattttttaatgttacagctcagaatgtctcacctactcmttttactaacccaaatcctttctcaggacccgttctgcctgcagagcattcagattaattgtcaagatttctaaaggctgctttgaccatgattacttcctgtgaatttcactgcaagcagaagcaaagcacagtcatggcaaaactgcagatttctccaggctgggccgacacatgaatgtcttcaatgtgaattcaagtatttgagagttgctgaggtaaagcc

SEQ ID NO: 94086 - DNA, 600 bp, Chicken  19866894471663_3
cttaaaaaccacttagcaccaatcccctgcygtgggtagggatgcctatctctgcattaggcaggacagaacatcaggacatgaggtgggatcataacagggacaaaacagtggtggttgctgttctggggaaataaagcatgcactgagcagtcaggggatgacttatccctagcaagggttttcttctaagccccaaaagctgcaggttggttcgtgaccccargctacagcgtatacaccccttcctaagacccggttattttttaatgttacagctcagaatgtctcacctactcmttttactaacccaaatcctttctcaggacccgttctgcctgcagagcattcagattaattgtcaagatttctaaaggctgctttgaccatgattacttcctgtgaatttcactgcaagcagaagcaaagcacagtcatggcaaaactgcagatttctccaggctgggccgacacatgaatgtcttcaatgtgaattcaagtatttgagagttgctgaggtaaagccaggcccgaaggttgaggactgctatttataccccacttgcctggactcgggcacgtcaggccatgtgggacatc

SEQ ID NO: 94087 - DNA, 599 bp, Chicken  19866894471669_1
  misc_feature (1)..(150): n is any nucleotide
nnnnnnnnnnnnnnnnnnnnnnnnnnnnnnnnnnnnnnnnnnnnnnnnnnnnnnnnnnnnnnnnnnnnnnnnnnnnnnnnnnnnnnnnnnnnnnnnnnnnnnnnnnnnnnnnnnnnnnnnnnnnnnnnnnnnnnnnnnnnnnnnnnnnnnaggctgcgagtaaatggggtgggagagggagagcaggaggggaagggggaaagaaaaggggggaaggagagggaggacgagggagtgatgaatgatggaagggaaagacgggtgaacaagggaagtggaaggggagaaatgagacggatrgaagagggtaaagaggaatggcagataagagagaagaaagtctgaagaaagagtgggagagaaatgagagatgccgagacagaatatttaagatagggctttaatggagctgggtctgggtgcttggatatccggaagatgtgaggggtaatcactctctcagcatgtatatactattgatatgttaatacaattctcttttttatctgaaagcgatgaagttttcaaactagctgattaactaggtctggctgctcctgggtacacacatgtattcacaaacatgtcacatataaatg

SEQ ID NO: 94088 - DNA, 600 bp, Chicken  19866894471673_1
cctttggctcttagagcatattaatctgttttttcttggatcatctgacaccccttaggtctttgtgccactgaaagataagtagtctcttgccaaaccaatgttccaaatctccttttgactttatttgatgccagatcattgtcccttaactgcatccccactggaagccagagctggccctgctgcagactgcactggggccacagaaatgtagaagagtgctatgcttatcctggtttgtcttgttgtggactccccctgtgtgatttccattctgatagaactttggcagcttgyacttagagtgttgaatgtcattgagcttattttaaagcagtaacttaggctgagcttttctttgtggagtttgaagcctcattcttgtcattgcgaatggaattagtgtgggctcacactggaaaagctcagcccaactacrtcaggatcagttcaacagttgacagtggggaaggaatgtgaagtgcttataggaaggtgagattgtatgggtcatgttatcttcgagagattggtggtagagtgtcacagcaagttctggaaaagtggctgcctttggcaggggttgagcttcactcc

SEQ ID NO: 94089 - DNA, 600 bp, Chicken  19866894471673_2
tgtcccttaactgcatccccactggaagccagagctggccctgctgcagactgcactggggccacagaaatgtagaagagtgctatgcttatcctggtttgtcttgttgtggactccccctgtgtgatttccattctgatagaactttggcagcttgyacttagagtgttgaatgtcattgagcttattttaaagcagtaacttaggctgagcttttctttgtggagtttgaagcctcattcttgtcattgcgaatggaattagtgtgggctcacactggaaaagctcagcccaactacrtcaggatcagttcaacagttgacagtggggaaggaatgtgaagtgcttataggaaggtgagattgtatgggtcatgttatcttcgagagattggtggtagagtgtcacagcaagttctggaaaagtggctgcctttggcaggggttgagcttcactccttaagggaccatgcaatggaaggaaattccaagtgggtgccacrcaagagatctcctctcaagctgggacttaactcttctatttgaggatttgggatgagaaagattcaggtttgcagttayatcagcctcacagtttgcc

SEQ ID NO: 94090 - DNA, 600 bp, Chicken  19866894471673_3
ttaggctgagcttttctttgtggagtttgaagcctcattcttgtcattgcgaatggaattagtgtgggctcacactggaaaagctcagcccaactacrtcaggatcagttcaacagttgacagtggggaaggaatgtgaagtgcttataggaaggtgagattgtatgggtcatgttatcttcgagagattggtggtagagtgtcacagcaagttctggaaaagtggctgcctttggcaggggttgagcttcactccttaagggaccatgcaatggaaggaaattccaagtgggtgccacrcaagagatctcctctcaagctgggacttaactcttctatttgaggatttgggatgagaaagattcaggtttgcagttayatcagcctcacagtttgcctcttgtgttgtggctgattggtacagccatgcagttgtctgtagcaggagcatgagaagcggaagtgaaatcaggagtgctggtgcatgttgccagccttcttggaactgactatgcttgtattgccccttaaaaagctggagcaggcctgggctctgccttatcagtagcagtctacttgtgacctgctgtgcagaaatgt

SEQ ID NO: 94091 - DNA, 600 bp, Chicken  19866894471673_4
aaagctcagcccaactacrtcaggatcagttcaacagttgacagtggggaaggaatgtgaagtgcttataggaaggtgagattgtatgggtcatgttatcttcgagagattggtggtagagtgtcacagcaagttctggaaaagtggctgcctttggcaggggttgagcttcactccttaagggaccatgcaatggaaggaaattccaagtgggtgccacrcaagagatctcctctcaagctgggacttaactcttctatttgaggatttgggatgagaaagattcaggtttgcagttayatcagcctcacagtttgcctcttgtgttgtggctgattggtacagccatgcagttgtctgtagcaggagcatgagaagcggaagtgaaatcaggagtgctggtgcatgttgccagccttcttggaactgactatgcttgtattgccccttaaaaagctggagcaggcctgggctctgccttatcagtagcagtctacttgtgacctgctgtgcagaaatgtaagctctctgctcttcccaggacgagatgtggcttcctgtggggtttgcgtgtactgaagtctttgcactgtgacacag

SEQ ID NO: 94092 - DNA, 599 bp, Chicken  19866894471678_1
  misc_feature (1)..(128): n is any nucleotide
nnnnnnnnnnnnnnnnnnnnnnnnnnnnnnnnnnnnnnnnnnnnnnnnnnnnnnnnnnnnnnnnnnnnnnnnnnnnnnnnnnnnnnnnnnnnnnnnnnnnnnnnnnnnnnnnnnnnnnnnnnnnnnnnggtggcatgacattggcacaggctgcccagagaagctgtgaatgacccatccctggaggagttcaaggccaggttggatggggccctgggcagcctgatcatggcagcgggttggatctgggtggactttaaggtccctaccaacccgagtccttctgtgattctataattytatgattttatgtctgacagcttattccacgtgcacccttatttttctttttggtaatgtttagtgtgaatgtccttcttactttctcactaaatgtgtttaaaatccttaaaataacgatcaaaacctaatctctttctgctttcctacagtttctcttcttgctctcgcatttgaaccagagaaatcagttatccttgcagtatgggaagccatacaaaggctggttttacttcgtgtgaaacaatactcagatctcaaatgtgaacaggtctgtgttttggttctaagctttactg

SEQ ID NO: 94093 - DNA, 600 bp, Chicken  19866894471680_1
ttcatccccaaaacaacggtattagcacggcagtgggattacatagccctgcttctccctgttagtagtcacaagacagaaacactgctaataggtagatgtcatttatgctactggcaaaactttgcattaaatcaattcctctatctgcagccaagtatgaaccagaatagagcactggtttctgtacaaatgaacatctacatggctgttggtattaaagtacataaagagtgaagtcatagccactgagactacagagagacttctggggaaagaatgtatatatttattcaaatktgatttagtcagaatacatgataaaaatctttatttctgatgcttattcacaaagaagtrtaaataactccatttctaccctcaactctatcacgttatcaggcctggattcaaatgtatttctactcattaattcacagtaatgatttttatgaggtgtgcattaaaattggccataaatgttttactctgcctgaatgacttgtagcattctatagctataaggaaattgcctgagcagaatcataaggtgcagtgtggccgttcacagcatttacaatttgtcatgaaaatagcact

SEQ ID NO: 94094 - DNA, 600 bp, Chicken  19866894471680_2
gttagtagtcacaagacagaaacactgctaataggtagatgtcatttatgctactggcaaaactttgcattaaatcaattcctctatctgcagccaagtatgaaccagaatagagcactggtttctgtacaaatgaacatctacatggctgttggtattaaagtacataaagagtgaagtcatagccactgagactacagagagacttctggggaaagaatgtatatatttattcaaatktgatttagtcagaatacatgataaaaatctttatttctgatgcttattcacaaagaagtrtaaataactccatttctaccctcaactctatcacgttatcaggcctggattcaaatgtatttctactcattaattcacagtaatgatttttatgaggtgtgcattaaaattggccataaatgttttactctgcctgaatgacttgtagcattctatagctataaggaaattgcctgagcagaatcataaggtgcagtgtggccgttcacagcatttacaatttgtcatgaaaatagcacttaagaattcccagttgattgttagttacattaaaatgttattaattactctagagtttcc

SEQ ID NO: 94095 - DNA, 600 bp, Chicken  19866894471680_3
aatttctgatgtgactggttccccacctgtaatatactagaaagctggcagaactagattagggattctaatcaaatctcatatttcaggcaaacaacctaagtcatagaggcatatgataaccctcctcatttgttgataatgaacatgaaaaatgttccttaactctaattgaactactaggtgccgaaaattgcttttttattcatgaattccagtcagaagcaactccagaacactggctgacctgaacatacctgcaaccagatgaacaggcagacagacttgtgcaagcactcrcattcatggccagtttgcatttgtgagtgagtcctaaaagcatactattttactaggcaagaatagggacatataaagcaaaagaaaatattgttatccccattttacagggcctgtaatagtgaccaaagagtttagtagcctatcttagattacatggcaagcctgtggtacaggcaggaaatgaaaccaggtctacttcacctccatttcctagtgcaagatcatccttctcctttacatctgcatatctgaaatcaaaggcatacacgtatacacattctttcagattaaatcatg

SEQ ID NO: 94096 - DNA, 600 bp, Chicken  19866894471680_4
cagtttgcatttgtgagtgagtcctaaaagcatactattttactaggcaagaatagggacatataaagcaaaagaaaatattgttatccccattttacagggcctgtaatagtgaccaaagagtttagtagcctatcttagattacatggcaagcctgtggtacaggcaggaaatgaaaccaggtctacttcacctccatttcctagtgcaagatcatccttctcctttacatctgcatatctgaaatcaaaggcatacacgtatacacattctttcagattaaatcatggaagacttayacagttctgttcttgcaagtagtaagcytttaacttaatctgtaattgaagaggcagcattttcaggaggcaagcccattccagggcactaaatcaatacagactatgggggagaacactgctcatgtttttgggaccttctctagtatcacctttgcagcccctcaagttttctctttgaactcaataaatcttatgaggtcacaaccatgaatagtagggaagtgagaaaaataagcaataaaaaatataacagaaagaccagcagatcacttgcttttacagagcataacaccacag

SEQ ID NO: 94097 - DNA, 600 bp, Chicken  19866894471680_5
agcatactattttactaggcaagaatagggacatataaagcaaaagaaaatattgttatccccattttacagggcctgtaatagtgaccaaagagtttagtagcctatcttagattacatggcaagcctgtggtacaggcaggaaatgaaaccaggtctacttcacctccatttcctagtgcaagatcatccttctcctttacatctgcatatctgaaatcaaaggcatacacgtatacacattctttcagattaaatcatggaagacttayacagttctgttcttgcaagtagtaagcytttaacttaatctgtaattgaagaggcagcattttcaggaggcaagcccattccagggcactaaatcaatacagactatgggggagaacactgctcatgtttttgggaccttctctagtatcacctttgcagcccctcaagttttctctttgaactcaataaatcttatgaggtcacaaccatgaatagtagggaagtgagaaaaataagcaataaaaaatataacagaaagaccagcagatcacttgcttttacagagcataacaccacaggtttataaggtgaagttatgttgagagg

SEQ ID NO: 94098 - DNA, 600 bp, Chicken  19866894471680_6
tctgtcatacaggtatctaaatgccgagactgagggagacattggaggacactacacggccactctcttcatttcagagaaaaccagggggcacagaatagtgatgcttttcagatttgcccttatgtagagtctgcaggtggcagcaatggctataagcaccagcacaacacacatatgccttacagttcacatttcctcaggtcttccatacctcttggattctcaagcttgttcctcctcagcaccaagatatttttttaaacttcagctcacactaaatctttgtgagaaatcttktcaacatctacaaagaaaacataccagaaaaaaatgttttctcccctcagtgtaagacatcccacggtaaaataaatgaagacctgtctaaatgcaaaactaagctatgaatgaacatatcttctgtgattaagtgtatgaactacagttaacaaaaaaaatatactctgagattgcacaacatttacagattacagagcgcatagcaccaagttaaagaattgctgctgcagaagtattttatgaatgcagaatatacagtcagtgacttacctccctcttgctttcctggatgacatt

SEQ ID NO: 94099 - DNA, 600 bp, Chicken  19866894471688_1
attaggaatgcatcacctctgtacatcagtagaggaaacattttgtttccgctcttgtccatataaagataggtgcttaaactcctgcacagatggatgctttcaggatgaaaacctgagatccaccgtcagtagcacaattcttactgatttaaatagggtagaatcaaacctagagagcgacaacaaggcatctctgttcagtgctttggtctttccagctgtatgtgcagcacatggagtttgttgatatcttaatatgaataaaatgctcattgacatgttttatgtgtctgcatrtgcactgcagctggatgcacaagtcacagctccaagatcttaacccttttgtctgatcacaaattaccagccaaggcagtgattttcatcacttttattctgtttttcttaggcatgcaatggatcagtttaggaatgcaagctatattttacaccttgctaaaaaatagttggttcatgtctgcctcagttcaggaatgaacctaagcctgaccatggaaggggctgtgcaacacttgaaatacctttttgcacagtgactggccaccatggctctccaatgcgggctttatagcaaac

SEQ ID NO: 94100 - DNA, 600 bp, Chicken  19866894471689_1
tcctaatgcataagacattcccaagcaacaaaccatcagttgagatctataggcgtggaaaagatagctcatttagtggtctgagctaactgtgtaagtatcaatatactacaggcacaactgagagcaccacccactaatgtttataaacaccacctaaagcactgttatcccatagtttgcatttcctgtgtctgagaggcaattgacttctcctgaggagcctgggagactcctacccttttctcatccaactgatccctgttttgttgctattcttagaaagctccattgaagttyggtgttcagtctttgtggcagaaagatatgttgtaacactgacttctgagaacaaaagagtgtgtagagtgagttctttttatgttgtcttggtatccacagcaaaaatacttgataaatccygttaatctgtgtgtattaatttaaatactagacagtttcatgattctgaacgttggtggaaatgtttcaattcttgcattcataaggaatgcatcagtttcaaaatcarttactgcttgactctgagaaactgaccttcartgggcttcaatacattcagggctgtagctcataact

SEQ ID NO: 94101 - DNA, 600 bp, Chicken  19866894471689_2
agagcaccacccactaatgtttataaacaccacctaaagcactgttatcccatagtttgcatttcctgtgtctgagaggcaattgacttctcctgaggagcctgggagactcctacccttttctcatccaactgatccctgttttgttgctattcttagaaagctccattgaagttyggtgttcagtctttgtggcagaaagatatgttgtaacactgacttctgagaacaaaagagtgtgtagagtgagttctttttatgttgtcttggtatccacagcaaaaatacttgataaatccygttaatctgtgtgtattaatttaaatactagacagtttcatgattctgaacgttggtggaaatgtttcaattcttgcattcataaggaatgcatcagtttcaaaatcarttactgcttgactctgagaaactgaccttcartgggcttcaatacattcagggctgtagctcataactgattgtactatatgtgtttttttaatcaaatatttaagaatgttttttctgaaaaacaagctattatgagtaagatcttaaattacagcacygtaatgcaatctgtgcagcttagcagccagg

SEQ ID NO: 94102 - DNA, 600 bp, Chicken  19866894471689_3
ctcctacccttttctcatccaactgatccctgttttgttgctattcttagaaagctccattgaagttyggtgttcagtctttgtggcagaaagatatgttgtaacactgacttctgagaacaaaagagtgtgtagagtgagttctttttatgttgtcttggtatccacagcaaaaatacttgataaatccygttaatctgtgtgtattaatttaaatactagacagtttcatgattctgaacgttggtggaaatgtttcaattcttgcattcataaggaatgcatcagtttcaaaatcarttactgcttgactctgagaaactgaccttcartgggcttcaatacattcagggctgtagctcataactgattgtactatatgtgtttttttaatcaaatatttaagaatgttttttctgaaaaacaagctattatgagtaagatcttaaattacagcacygtaatgcaatctgtgcagcttagcagccaggggcagtgctgaatttctgttgctcattcttctccctaaacaaaatagtctccaattggaaaaataatggatcttctagagacccaaaattgtcatttgggggttaggag

SEQ ID NO: 94103 - DNA, 600 bp, Chicken  19866894471689_4
ttttgttgctattcttagaaagctccattgaagttyggtgttcagtctttgtggcagaaagatatgttgtaacactgacttctgagaacaaaagagtgtgtagagtgagttctttttatgttgtcttggtatccacagcaaaaatacttgataaatccygttaatctgtgtgtattaatttaaatactagacagtttcatgattctgaacgttggtggaaatgtttcaattcttgcattcataaggaatgcatcagtttcaaaatcarttactgcttgactctgagaaactgaccttcartgggcttcaatacattcagggctgtagctcataactgattgtactatatgtgtttttttaatcaaatatttaagaatgttttttctgaaaaacaagctattatgagtaagatcttaaattacagcacygtaatgcaatctgtgcagcttagcagccaggggcagtgctgaatttctgttgctcattcttctccctaaacaaaatagtctccaattggaaaaataatggatcttctagagacccaaaattgtcatttgggggttaggaggcacataagcacagatttatgtacttaaagca

SEQ ID NO: 94104 - DNA, 600 bp, Chicken  19866894471689_5
gtatccacagcaaaaatacttgataaatccygttaatctgtgtgtattaatttaaatactagacagtttcatgattctgaacgttggtggaaatgtttcaattcttgcattcataaggaatgcatcagtttcaaaatcarttactgcttgactctgagaaactgaccttcartgggcttcaatacattcagggctgtagctcataactgattgtactatatgtgtttttttaatcaaatatttaagaatgttttttctgaaaaacaagctattatgagtaagatcttaaattacagcacygtaatgcaatctgtgcagcttagcagccaggggcagtgctgaatttctgttgctcattcttctccctaaacaaaatagtctccaattggaaaaataatggatcttctagagacccaaaattgtcatttgggggttaggaggcacataagcacagatttatgtacttaaagcaatattttagtggagactgtgcctaatgtccagggagtgttcttcaaagctgcaggtgcttgctgcctgtggataccttctcccactagggctggggtgccttggatgcttgctggtaccaaaaaggag

SEQ ID NO: 94105 - DNA, 600 bp, Chicken  19866894471694_1
tcggcccatgggagggttcgcgctccctcagcaaaacaaacctaaatgagcatctgggcagcatttgattcctgctctgtgctgttgacgtactcagctgctccgtgccatgcccacggccagcagcaataaagcaggcggttattaaattaacctgctaagacacagatcctgcagggatgttcggggagcagacagatggcacaagcaaagggccaggactaattgcaatccccatctcacgaaggtgagaggcggctcctgcacagtgccgcagggccctgccctgtcctgaagccyggagaggagcagcccaggctctggagggacagggtagctctcatggcaggggtacagctacttcctcaccagacaaagcgtgagcagtgcactgcctgctgctgctgcctctgcaggctgcaattactgagcagaagtggctgtgactcactgcctctgcccgagctctgcgccaggcccttgccagccagcctgcagcaggtggctgagcggaggctkctccagcagggacagccaggatttcacctgagttttgctctagccgagtatatagtatgtgtggatataggcaaaagaagc

SEQ ID NO: 94106 - DNA, 600 bp, Chicken  19866894471694_2
gactaattgcaatccccatctcacgaaggtgagaggcggctcctgcacagtgccgcagggccctgccctgtcctgaagccyggagaggagcagcccaggctctggagggacagggtagctctcatggcaggggtacagctacttcctcaccagacaaagcgtgagcagtgcactgcctgctgctgctgcctctgcaggctgcaattactgagcagaagtggctgtgactcactgcctctgcccgagctctgcgccaggcccttgccagccagcctgcagcaggtggctgagcggaggctkctccagcagggacagccaggatttcacctgagttttgctctagccgagtatatagtatgtgtggatataggcaaaagaagcgtaagactttgtgtcatttcttcaccgacctcataaccgtaaaaacggctttctgtttcagctccttcagagtacgacgaggtctgtcttaggggctggatgtgttcacttggctgagcctcttaattctgggcctttgcagcagcattacctgcagagacacttttcctctttgccagtttctcctgccaacgtggagatgactcagaggcaagttct

SEQ ID NO: 94107 - DNA, 600 bp, Chicken  19866894471694_3
acctgcagagacacttttcctctttgccagtttctcctgccaacgtggagatgactcagaggcaagttctgaggacttctctcagaaattacttgtttctgctgggctgcttctacctattactttgcttgcacctaaaagaaagagatgtatctgaagcagttaccgattctggggatgcactgagttacagctggtaccagaaggtaactggagtttctgaggaggacaatcccagtcctgctcacctccccagatccccacataccttgtgatgccagcgcagctcgctctcactaygatcagcttctaccaactaccccaaagctgaagggatggggatggcctcagacttccccatggcaaatcaccaacgcatgtgacagcctctctctctctgcatacgtggagaggcttccagccagcgctgtcatggagtaaagctgaaaatatgcctctctaaggctcaaaagcctgaaggcaacaacgaacaaataaaccaaacctgttgttttgaaccctaactgaaaagaaaggtggaggaaggtaaacatgctgtcaagatatattgaagacttgtgaaaataaagcaatttaaaa

SEQ ID NO: 94108 - DNA, 600 bp, Chicken  19866894471694_4
tcatgggtttccctttttaatcatattccctcagcaattacaattcaaatgctacagcagcgtgcaaacttgtgcatgaaatgcaatagcagaatgaagcggccaacagtcaattagagtgatactctgcagttcattcccattgcagggagagaataaaacctaaaattcgacccagatggggatttgtgacaacgctgcatgccatgccccacccctgtgcactcttcttcacactcaccactttttccagccgcagctgaggttgtgcacgtgcaacaaagtgagcagagagttctygtgcatgtctctggatcagcacamtgcatgtggctctctggagggaggaggcaggtaacgggctgggatgtaagctcttctttcccatcctccagtcctcatgaagaagtagcagctcttgttcatgcgatcccaagggagggaggggcttgaattttgggtggtcctgtgtggggccagacatggggctagataatccttgtgggtcccttccaactcaggctcttatatgattctacaattctaagtgtattggcagagccgcaagcaatgtctgtctggacagacagagattctccc

SEQ ID NO: 94109 - DNA, 600 bp, Chicken  19866894471694_5
attccctcagcaattacaattcaaatgctacagcagcgtgcaaacttgtgcatgaaatgcaatagcagaatgaagcggccaacagtcaattagagtgatactctgcagttcattcccattgcagggagagaataaaacctaaaattcgacccagatggggatttgtgacaacgctgcatgccatgccccacccctgtgcactcttcttcacactcaccactttttccagccgcagctgaggttgtgcacgtgcaacaaagtgagcagagagttctygtgcatgtctctggatcagcacamtgcatgtggctctctggagggaggaggcaggtaacgggctgggatgtaagctcttctttcccatcctccagtcctcatgaagaagtagcagctcttgttcatgcgatcccaagggagggaggggcttgaattttgggtggtcctgtgtggggccagacatggggctagataatccttgtgggtcccttccaactcaggctcttatatgattctacaattctaagtgtattggcagagccgcaagcaatgtctgtctggacagacagagattctccccagactgcatttgcaaaagctaac

SEQ ID NO: 94110 - DNA, 600 bp, Chicken  19866894471698_1
gtttgtgaaaggaggtgcattgtgtagcatgacactatcttacacagcatctaaaagtcgcatgacttttgctcaagactgtgatttgatgaaaaaatacaagtagtggcagttttgtcctcagcaattgattttgcctctctgttcccatgctcccatctctattgttttattgcttttttttttttttttttaattgggtttgtttcctaatgagttttgtggtgcaaccttgaaatggttgagatcatgcaagcaggagcaagcagctcacaggaagggggcagggactgtttcatycagggctgctctgtacatttggcaccattgagcacaacctccgtgtttccctggatagaagaattgtatctccttatccagtgacatttcacaggttatcttaattctagttagatagacgtatctctatattcattttgatctctattgatactgctaggagcaagttaaaataaagataccagactcaattttttttttatgttgctaccatcagctaaagagaacacagtcttattcagtgtttctaggcaatttcatgagttaatgcccagaaaactagaactgggctgcaaggaa

SEQ ID NO: 94111 - DNA, 546 bp, Chicken  19866894471698_2
tagaagaattgtatctccttatccagtgacatttcacaggttatcttaattctagttagatagacgtatctctatattcattttgatctctattgatactgctaggagcaagttaaaataaagataccagactcaattttttttttatgttgctaccatcagctaaagagaacacagtcttattcagtgtttctaggcaatttcatgagttaatgcccagaaaactagaactgggctgcaaggaagcgaataagacacttagctttgtatgacctgtgtggactgctcacttgggaacargaatgaaaaaataaactatagtttatcacagaggatctttgccttgctgcagcagtagaagtgatatagcaaaaacatattgattctctgggtgactgataaagctacagcactgcaaggacttctcacagtaaatccgagtttaatttttccatccaaatgtcttgaataatgcagccttcatctgctggtcacctctctgcagcactctttaggatgataacagcgctgtttacccagcgtagg

SEQ ID NO: 94112 - DNA, 600 bp, Chicken  19866894471701_1
acattcatcaatgcttactgaacatttctggaaaacaaacagaggatttgagcacagtgaggcagtgggtggggcatttcagcagtgctgacagtgggtcaccatcactgatatttgtgagtgcagcacgcaggctcttgttcattactggcaaaaatgcacagctaatagtggtgacaatactgaaaaatggtattttatagctgagtatttcctctgtcttatagtgtttttgtgctctttgtatctgtaattatttccatgaaataaataggaggcattactttcagtgaccttggyatattacatycttgctaggtcaaggcaggcaaataaaagagtaacaaccctacatatgaaactactggctacttcaatatacactatctttatatttctttcctatcctaatgaaccagacataagttyggttaaaaataaaaaagcatcaccgcattgtccatccatcctgctcaatattcctttaaatatttccgagaagatctgttctttctgatgaaggactcaaattctccacagaaacttactgaaactggcagaaatttccaaaaggaaatacagctgtgtatttgatraagg

SEQ ID NO: 94113 - DNA, 600 bp, Chicken  19866894471701_2
atgcttactgaacatttctggaaaacaaacagaggatttgagcacagtgaggcagtgggtggggcatttcagcagtgctgacagtgggtcaccatcactgatatttgtgagtgcagcacgcaggctcttgttcattactggcaaaaatgcacagctaatagtggtgacaatactgaaaaatggtattttatagctgagtatttcctctgtcttatagtgtttttgtgctctttgtatctgtaattatttccatgaaataaataggaggcattactttcagtgaccttggyatattacatycttgctaggtcaaggcaggcaaataaaagagtaacaaccctacatatgaaactactggctacttcaatatacactatctttatatttctttcctatcctaatgaaccagacataagttyggttaaaaataaaaaagcatcaccgcattgtccatccatcctgctcaatattcctttaaatatttccgagaagatctgttctttctgatgaaggactcaaattctccacagaaacttactgaaactggcagaaatttccaaaaggaaatacagctgtgtatttgatraagggatgactgac

SEQ ID NO: 94114 - DNA, 600 bp, Chicken  19866894471701_3
gcaggctcttgttcattactggcaaaaatgcacagctaatagtggtgacaatactgaaaaatggtattttatagctgagtatttcctctgtcttatagtgtttttgtgctctttgtatctgtaattatttccatgaaataaataggaggcattactttcagtgaccttggyatattacatycttgctaggtcaaggcaggcaaataaaagagtaacaaccctacatatgaaactactggctacttcaatatacactatctttatatttctttcctatcctaatgaaccagacataagttyggttaaaaataaaaaagcatcaccgcattgtccatccatcctgctcaatattcctttaaatatttccgagaagatctgttctttctgatgaaggactcaaattctccacagaaacttactgaaactggcagaaatttccaaaaggaaatacagctgtgtatttgatraagggatgactgacaggaaaccaccaccaagaagtagttcttgcaattaaaataaaaagcaaaccctttcctcaaatgactgagctcctcgccattttccttgtttgtaaaacagcagctggacttcctgtga

SEQ ID NO: 94115 - DNA, 600 bp, Chicken  19866894471701_4
tggyatattacatycttgctaggtcaaggcaggcaaataaaagagtaacaaccctacatatgaaactactggctacttcaatatacactatctttatatttctttcctatcctaatgaaccagacataagttyggttaaaaataaaaaagcatcaccgcattgtccatccatcctgctcaatattcctttaaatatttccgagaagatctgttctttctgatgaaggactcaaattctccacagaaacttactgaaactggcagaaatttccaaaaggaaatacagctgtgtatttgatraagggatgactgacaggaaaccaccaccaagaagtagttcttgcaattaaaataaaaagcaaaccctttcctcaaatgactgagctcctcgccattttccttgtttgtaaaacagcagctggacttcctgtgatcctctatggcaacagagggcagcaatgcagccagctcaggaacaagaaagcaagaagtgactgatttctctacgcctaaaaatcccaagggcaagctggctgggctagagaggcagcgtttccacatgccatacctggttaatatcccttgggaatcatgaagaga

SEQ ID NO: 94116 - DNA, 541 bp, Chicken  19866894471703_1
gaatcatagtatcattctggttgggaaagatttctaagatcaccaagtccaactgtcaagagcagtgatacagtggcacagctgcccaaggaatgatggtgtgaccatccccagaggtgttcatgagctgtggagatgtggcactgagggacgtgggacgtgggcacggtggggtgagggttggtggttggtgattggacaagatgattttagaggtcttttccaaccttagtgatcctatgatgctatggcagctcgaggacacgcaccctgtgcaagctcccagcttgtccagcagtwtctctcagtgtttcctaatgcagggtctgggcctgaatttgagctaccacagacacaggctcagggctttcacaaaatggtagcaagggctctgccctgcctcttgtggctccagcagaactatactgggagatgctgtgggggcacacaggagtcatgccatgggaaaggagcgggtgctgggagaaggaggcctggcagctgtcagctcaacccagtggggagcagcgcaaaacaatag

SEQ ID NO: 94117 - DNA, 599 bp, Chicken  19866894471712_1
  misc_feature (1)..(92): n is any nucleotide
nnnnnnnnnnnnnnnnnnnnnnnnnnnnnnnnnnnnnnnnnnnnnnnnnnnnnnnnnnnnnnnnnnnnnnnnnnnnnnnnnnnnnnnnnnnnttcgtttctgtgatcttccttgtctcagcttgtctcctcttgataaatttattagcactattatcatcagtagagttctgcatggattcacaacctctcccatgagtccctaaacaaacagattagctgctgcacgatttccctggatacatgaagaggaaaatgtcacagaccttttctgtttgcttgggagcagccacacaatgtstgtaggtactcattctctcgacttgcatgccaaaataacaagttctttccatgtaatgtattttcccagattatgcagtagcagaaggttccagttccacatatgtccactggaactaatggatgtgtgaaaatttatgtgaagaaagcttctgaatctgcagagatttatcctccccatactgttagtggaaataaccatgtctgctcttactcaaatttcatgctaaggcaactcaattttgaacttaaagtggaagatgactaaggagaagtgcctttaaaagaggcttttctggc

SEQ ID NO: 94118 - DNA, 600 bp, Chicken  19866894471712_2
gttagtggaaataaccatgtctgctcttactcaaatttcatgctaaggcaactcaattttgaacttaaagtggaagatgactaaggagaagtgcctttaaaagaggcttttctggctcacttaaaccaaaggaatagcagggtggctgttgtatgaatcactgtttaaagcaagcagtgctgtagctcagtacacggtttctgtctccaggtgtgaatacttggcacaaagcaaaggaaacagcaaatctgaagttagtcttaccatgcctctatcctcccagctttcatcaaatacttwaaagactttttagcagcaggttgcacttagatgtttacatttaatagctggtgatgagttcagtctccatgcatgtgtctgatctctatttttaaccttgtcttggacccaaaacagcaagatgagtataggaaaatcataggcatccagccttgtctcttgtatatcatcatgtaggcatattacatgcgatctgctttgctatgtgtcagctcctttcagaagctcctctgccttaattaagcagtgacctcaacagaatctttcagaaaatgggaccaattgttctcagtcttcaga

SEQ ID NO: 94119 - DNA, 600 bp, Chicken  19866894471716_1
ctttacctaaacacagtaattttgcataagctgccattgtggctgtgctagtttcactttgccaatgaagagtaaggcctcagttaccaacaacagcgtaattctgctctcagagtactgacagtacccttggtatttatggatctgtgtctgcaatataaagttcattcatagacatcatctctggaaacaagtcatccggagtctgatttcagaaaacccaatgcaaatctatgtacaaaatttttaaaaacatagactttgtgcataacaaaacacaaggatgatcctaacatagcycaaactataaaaatgaattagtatctccaggtcagaagaaaagctcatcctaaatataaaatgttttcagatgttcatacaacataccatctttcattgctttatgtaactctgaaggggtataagtactcatttctacatggtataataccagttaaatcacaagcttcatataattattaatggattcctgagaatctctagttttaaaagagctcgacagtgactagtttgcatggactatctgtacgagtccacagttcagctgtgttttcttcatattttacataatgtaaaaaa

SEQ ID NO: 94120 - DNA, 599 bp, Chicken  19866894471722_1
  misc_feature (1)..(127): n is any nucleotide
nnnnnnnnnnnnnnnnnnnnnnnnnnnnnnnnnnnnnnnnnnnnnnnnnnnnnnnnnnnnnnnnnnnnnnnnnnnnnnnnnnnnnnnnnnnnnnnnnnnnnnnnnnnnnnnnnnnnnnnnnnnnnnnactcgttaactaaatcattttataatggcagaacttctataaggaagacaacaacagttaggctaaaatggatgacaggaattattaagttcaaaggacgagagaggagagggatttgaatgcaggtctcttgtatcctccctaagtattgtaaccaccaatgaataacctasgacatttttgcctcagtatattytggggaggaaagacctggattagatgtctacacatgggaataacttgcatttcttttcccagcaaaaaaaaaaaaaaagtcagggtagttctaggcaaagtgatgaagattaaatgaagatgaactgcttcacatcgggaaatttggcccaaagacacttcttagggatagaagaagatagtgcttttcttgtcattggttccaggaagtaacacaatattgattgtattgcaaagtttgtgcatcactgcagtatgctgtcactctgcagacaag

SEQ ID NO: 94121 - DNA, 599 bp, Chicken  19866894471722_2
  misc_feature (1)..(104): n is any nucleotide
nnnnnnnnnnnnnnnnnnnnnnnnnnnnnnnnnnnnnnnnnnnnnnnnnnnnnnnnnnnnnnnnnnnnnnnnnnnnnnnnnnnnnnnnnnnnnnnnnnnnnnnnactcgttaactaaatcattttataatggcagaacttctataaggaagacaacaacagttaggctaaaatggatgacaggaattattaagttcaaaggacgagagaggagagggatttgaatgcaggtctcttgtatcctccctaagtattgtaaccaccaatgaataacctasgacatttttgcctcagtatattytggggaggaaagacctggattagatgtctacacatgggaataacttgcatttcttttcccagcaaaaaaaaaaaaaaagtcagggtagttctaggcaaagtgatgaagattaaatgaagatgaactgcttcacatcgggaaatttggcccaaagacacttcttagggatagaagaagatagtgcttttcttgtcattggttccaggaagtaacacaatattgattgtattgcaaagtttgtgcatcactgcagtatgctgtcactctgcagacaagcacgtgtctcaagacagtaactg

SEQ ID NO: 94122 - DNA, 599 bp, Chicken  19866894471722_3
  misc_feature (1)..(40): n is any nucleotide
nnnnnnnnnnnnnnnnnnnnnnnnnnnnnnnnnnnnnnnnactcgttaactaaatcattttataatggcagaacttctataaggaagacaacaacagttaggctaaaatggatgacaggaattattaagttcaaaggacgagagaggagagggatttgaatgcaggtctcttgtatcctccctaagtattgtaaccaccaatgaataacctasgacatttttgcctcagtatattytggggaggaaagacctggattagatgtctacacatgggaataacttgcatttcttttcccagcyaaaaaaaaaaaaaagtcagggtagttctaggcaaagtgatgaagattaaatgaagatgaactgcttcacatcgggaaatttggcccaaagacacttcttagggatagaagaagatagtgcttttcttgtcattggttccaggaagtaacacaatattgattgtattgcaaagtttgtgcatcactgcagtatgctgtcactctgcagacaagcacgtgtctcaagacagtaactgaaagagaactctcatgttcatctgatkttatcttacaaaagggaacttctgaagcattatatac

SEQ ID NO: 94123 - DNA, 600 bp, Chicken  19866894471722_4
tctacacatgggaataacttgcatttcttttcccagcaaaaaaaaaaaaaaagtcagggtagttctaggcaaagtgatgaagattaaatgaagatgaactgcttcacatcgggaaatttggcccaaagacacttcttagggatagaagaagatagtgcttttcttgtcattggttccaggaagtaacacaatattgattgtattgcaaagtttgtgcatcactgcagtatgctgtcactctgcagacaagcacgtgtctcaagacagtaactgaaagagaactctcatgttcatctgatkttatcttacaaaagggaacttctgaagcattatatactcacattattgtttcttgaggcagctacagtgagatacctactggctgaatgtctgatttcctactgtatgacttctttattataagataaaaaagtacgtrcggggtttgaaaatatttgagtaatctaaattttccgaagagctgtttttaactcagtgcttctaagatgatagaatgcagagaattttaattacagtggcttgtaataagcaaaatttgtctcagctcaaactgagtttgttgacaagaggactgaccaa

SEQ ID NO: 94124 - DNA, 600 bp, Chicken  19866894471722_5
ggatagaagaagatagtgcttttcttgtcattggttccaggaagtaacacaatattgattgtattgcaaagtttgtgcatcactgcagtatgctgtcactctgcagacaagcacgtgtctcaagacagtaactgaaagagaactctcatgttcatctgatkttatcttacaaaagggaacttctgaagcattatatactcacattattgtttcttgaggcagctacagtgagatacctactggctgaatgtctgatttcctactgtatgacttctttattataagataaaaaagtacgtrcggggtttgaaaatatttgagtaatctaaattttccgaagagctgtttttaactcagtgcttctaagatgatagaatgcagagaattttaattacagtggcttgtaataagcaaaatttgtctcagctcaaactgagtttgttgacaagaggactgaccaaattcacactgatgctcttttaatgcagtacttctgtttctgaagcaaattttacaattagatgcttccgaggcagaaagagtcacattaacaaatgagagcactgttttcagtaggtctgttgttttatgatcacttct

SEQ ID NO: 94125 - DNA, 600 bp, Chicken  19866894471726_1
tttatcaggttactgcggttttctaagaatgatagacagtaattaaaactaagctaataacctccctcactcttgacatttctacaggggttttgttcaccattatctacatatagattaaaaattgtaattggaccagagatggggttagaaaaatcaaccaccttccaactgatagtttgctggtgagtgacacttcggaattttatttaatctgagaaaattgagttggactccagtaaagttgagttatcgtgaagtacctgtgctggttaggaaatgcacttcattgcccaaccraagcacccagagctgctccagccctcctggaaccaaacacagagctgtctctgtgttatttacagagatttttatcccaatccgtggcaattcgtgatcactatagacacttaattattgctgcaataattattataacatggtattagtaatggagtaatgacagcatttattttaaaccgtgacatattaactaagcggggcagtattaattgcgatggcgaattatcctcatagacgctatttcaattattgttttgtcactattacgtttatgacagtaataattacatatctaat

SEQ ID NO: 94126 - DNA, 600 bp, Chicken  19866894471731_1
agaacatagccgaaagtatgacaaaatgaggtaaatacttaatcctagctatttgcaactttataaaccacagagtctttgaatataaccaattccacacaactctgagagccattcactcagatggtaagagctctcatagtaattctcacagaagcttccctgagtatgtttgttaagtctagctgactcagctcacgtgggacacaaagggagagagacagagatggtgtctgtgcagtactgactgaagggaaatgcacaacaagaggagtagatggctcattcaaaaaagatggrataaagaattgtttctggcttgtatgtatagggcttttgtaaagcacctattccaggaagacagcactgagaagttccaacctatctgwcctctactctcttgaagctagacacagtgagactgaaataaggaattcacattttaagacttctacccagaaatcactgcatataataaaaacagcaatctagtctaagttccatggcactccttacacatgcattgtgtggttggaaaaaactagctttactttaaaaacaaaacaccatcacacaaaacaaccacgaaagaatttgttt

SEQ ID NO: 94127 - DNA, 600 bp, Chicken  19866894471731_2
caattccacacaactctgagagccattcactcagatggtaagagctctcatagtaattctcacagaagcttccctgagtatgtttgttaagtctagctgactcagctcacgtgggacacaaagggagagagacagagatggtgtctgtgcagtactgactgaagggaaatgcacaacaagaggagtagatggctcattcaaaaaagatggrataaagaattgtttctggcttgtatgtatagggcttttgtaaagcacctattccaggaagacagcactgagaagttccaacctatctgwcctctactctcttgaagctagacacagtgagactgaaataaggaattcacattttaagacttctacccagaaatcactgcatataataaaaacagcaatctagtctaagttccatggcactccttacacatgcattgtgtggttggaaaaaactagctttactttaaaaacaaaacaccatcacacaaaacaaccacgaaagaatttgtttaaaacactaaagtaacagaatgctagaccacagatagagacaacagagtttgaactgggaaagaaaaccttacgagatgccttcagcaa

SEQ ID NO: 94128 - DNA, 600 bp, Chicken  19866894471734_1
gttggactgccatatcacattgcaaattgatgtccagttttctgtgtgctgttttcccccatgagtttgttttgtttcactgcattgcaaatatctcctcgtcatttaatatttgtgttctggattatttttccctggatgaatcgggctgcagttttgtgggtcgagtcccatttcatttcctgccatatttctgacctctttgggttcttcagtgcttcactgtcctcactggagttttaaacaccttgtagtttgtcctctgtaaatagaattttataggctgcttttatagatccytgaagttaacaagcgtggttttgtgcccacatgctctgccttggtaggcacttgctgttttaattgatagttctctgttaccagtctcacctgctcagtgttcttctgtgaggttttaattaatcattggtagtgtctggtagttctgcaggggctcctcttcagttcwtcagatgtttgctcttgtttattgtgtaagtgagcgtagattttctggtggtgtaaaatggttcctcagagtgcagcctttgtgcctcttcagtatggatactttcatttcaaaacttcatttttttttct

SEQ ID NO: 94129 - DNA, 600 bp, Chicken  19866894471734_2
cccatttcatttcctgccatatttctgacctctttgggttcttcagtgcttcactgtcctcactggagttttaaacaccttgtagtttgtcctctgtaaatagaattttataggctgcttttatagatccytgaagttaacaagcgtggttttgtgcccacatgctctgccttggtaggcacttgctgttttaattgatagttctctgttaccagtctcacctgctcagtgttcttctgtgaggttttaattaatcattggtagtgtctggtagttctgcaggggctcctcttcagttcwtcagatgtttgctcttgtttattgtgtaagtgagcgtagattttctggtggtgtaaaatggttcctcagagtgcagcctttgtgcctcttcagtatggatactttcatttcaaaacttcatttttttttctaaaaatgcacttctcaactatttttctttctttaatagagtcaacaatccagcatctaatcacttaaaataatttcatcttcacattaggctacccttaaggatgagcaccaaaccaccctgttccttttgcctattccaagagtgcttcttactttgcaggacccttc

SEQ ID NO: 94130 - DNA, 600 bp, Chicken  19866894471734_3
tatagatccytgaagttaacaagcgtggttttgtgcccacatgctctgccttggtaggcacttgctgttttaattgatagttctctgttaccagtctcacctgctcagtgttcttctgtgaggttttaattaatcattggtagtgtctggtagttctgcaggggctcctcttcagttcwtcagatgtttgctcttgtttattgtgtaagtgagcgtagattttctggtggtgtaaaatggttcctcagagtgcagcctttgtgcctcttcagtatggatactttcatttcaaaacttcawttttttttctaaaaatgcacttctcaactatttttctttctttaatagagtcaacaatccagcatctaatcacttaaaataatttcatcttcacattaggctacccttaaggatgagcaccaaaccaccctgttccttttgcctattccaagagtgcttcttactttgcaggacccttctggcctgtagttatgaccatggttttctcttctgcatctttctggagaatgacttttttcttgcctttacttggaactgctttccaaatgaatgacttggattaggaagaattgtatttgc

SEQ ID NO: 94131 - DNA, 600 bp, Chicken  19866894471734_4; identical to SEQ ID NO: 94130

SEQ ID NO: 94132 - DNA, 600 bp, Chicken  19866894471735_1
tttacctatggctttgtccagcaatatttctgttcagtgttcagtggtgtacacggcaagtgaggcaggcttgttgtgactgaaacatctgcagcactcctgccttatttgctgaaaatgtgagagtgcgtgctaagtacagcacaaggacacgcacagctgtgtagtcctgacctgaatttatatacctgcaggggaagttgttatgaacagcactggcttcttccagccttcttgtgtgaaagaatcagcatcttaacacctgttcactaggcagacagctgtgtgtggctcccaagsctatccttcatgtctgcagatggaaatctctgtcatccacatcctgtctcccactaccaattatacatcatgcatgcattaaaatgcacttgtttaaaccagtccagcatgtttgtaagttcctttataaatatgcaaatatacaaaaatgttttcttagtgcaggattttttcttagttacagggttgtttcagatattaaattaaaatcgagcatagctgaaattcctgaaataaatcagaccgattggcactggacaaggaaaagaaaattattatttgctcagtgttggctgtaac

SEQ ID NO: 94133 - DNA, 600 bp, Chicken  19866894471743_1
cgtacagagcagtgaactgtaaagatgtttcaggttggtcattttctgttggtccctccacagccttggatctcctagcactttggaagaacttggtttaactaactgactaaagtcattccataaataagggcagggtttttttctttatttttctctgcttttactttggttcaggggtagaatgactgattatgttcttcagagcctgtagaagaatagggtaaagagggaggttgaagagtctgatctgccagcagtgctgttataaacagtctcagaatacaccaatcaagcatyaggcacatagtggagaaaaaaaatgacttcccaaatgtctaatgtcatgcatagatagtaatgggcaggcattcagggcatggctgagaaaacacaatagcaggtttcagcagttggagctaatcagctgaaaacacagggtgcctggtctctgctggcatccgtgctgcttagactttgtcattcaaggtcatcatcccaaagtcagctcagctctgcccmactgtttccttcctacctcagggagatcaaacctagagtgtgcttatcatgccaaattactacattttattatttcta

SEQ ID NO: 94134 - DNA, 600 bp, Chicken  19866894471743_2
ggtaaagagggaggttgaagagtctgatctgccagcagtgctgttataaacagtctcagaatacaccaatcaagcatyaggcacatagtggagaaaaaaaatgacttcccaaatgtctaatgtcatgcatagatagtaatgggcaggcattcagggcatggctgagaaaacacaatagcaggtttcagcagttggagctaatcagctgaaaacacagggtgcctggtctctgctggcatccgtgctgcttagactttgtcattcaaggtcatcatcccaaagtcagctcagctctgcccmactgtttccttcctacctcagggagatcaaacctagagtgtgcttatcatgccaaattactacattttattatttctaaagaggattgaggcaccagagagcaactggttttctaagcaaagtatttgaacacattcttgactctggtatgccatttttaagtggagtagctttcatttgcttgaggataggctggccccccagaaacagcagattcttttgatgaagcacttacaaacagaatatgctgaaatagtttcagtctgtggaagcagagcagggccagggcacagtactgct

SEQ ID NO: 94135 - DNA, 600 bp, Chicken  19866894471751_1
tgtaaaattaagcctgaagaatttaggaccttgattatagccaccactatgacaaacttgcagaaatgcaaattgctttcaggtatattggtatataagtggtatcgcttaatttcacagaatacatgcttgtattctgtgatattaattgatcagtaaaggatcttccagtctttaccgtccattcccaacacagcagacacagatcctacctgtttccactttgttaatgctgtggaactcaggtctttttaccttcaaaatttcagtgaagctcaggtcatgttcatattcatcaayacacatcctactcacctccacttgcatcttcttttgcaaatcaggggttcccccagtgcacataacctgcaggtgaagagcctgtctgcctcagcaagaggcactggtgacctcacagccctgacctacagaatttggtgttggtcaaggctctgccatgtcaggggagttgctacagtgctgactgtgatgacagatgacaactgtgccttgtggtgcttctgcacgcattcttctagcctcttctagctgtgcctcttccagctgtgctctcagcttagtacctgtagacactgatca

SEQ ID NO: 94136 - DNA, 600 bp, Chicken  19866894471763_1
cacgactcttcaggtttcttattgctgggttttcccgtgtgtctttattctgacttattcattcaagaacgctgctgaaaacaactggaagagctggtgaggatggagagagggaagaaattggagaaacaatcatgcttgcctggatcagagaccacttacttgtctgctggtgagctgttttgtttgtttatgtgtatttatgaagcgggcacttttgccctatccttcacggcttgtggttcccctccagcacacatgctgctgctgtggaccttctcaatgccaccttgtcctgcrtggcattggctgggtcaacttcacagccaaaatctgcctctgctctgcccctgggatgccgacagctcatggagctccactttctgtaagcagaacaatcagacaacagcttctgagtaagtcctttgtggcacgaacatattggcagctctataggttgcttcttttaatcctcctgccatacagagaggataaaattcccgacacaaatggcaactctgcagcaagtatctgccataattatagtaattatattgtcttcacactctcttatgaatcagtgacagtatgtacttaatg

SEQ ID NO: 94137 - DNA, 600 bp, Chicken  19866894471765_1
ctgattgtaatggcttctatttgctctaagcagatcctgttcccttcctaagaagacctgaacagctacagggacataatattcccagtggaggatctgttcttagattcaggcagacataatgatgggagcccccctttttcgatcagccaacccatggccattttaatgtgattgccatctgagataagacacctggtgctgcatctggagaaacccatcccatggtattgagctgtcttttaatttattgtcccaggaaaacgttttgcaaatgctttacgtctcttcaggaacccwgccaccactctttgcacaagctggtgtggctggaggctatcccatgtgtgtgctgtgtgggaccagagcagccctgccacttgcaggggtgcagggacaagcttatcctctgtgcactcccacccatggggctcagagtgtatcagtttcacctccctgtcctttctggttgcaaaacaaatgttaacactgccctggagcactgctagtgacctctctggttacttctgagtgatggtgccgttcagcctgtgcctgctctgctgcttctaatgtgatcccagtgtgacaccaggggac

SEQ ID NO: 94138 - DNA, 600 bp, Chicken  19866894471775_1
cataagcccaatggagtacttgttagagtttggctgttcaattttccaaagattcagcctcctttgagaatgcttcagtccttcgcagcttctctgaattacctggactgggctgttcctgcagagactgaacaggccccattctggagttcagaggccaagcaaaacattcccttccattttcctactgctgccaaaggttgtttcaaaaaaaccaacaggcactaagattaggaattcaggccagaagcagagtataaaaataatttataatcagtagagcacacactgctgcagaasttggaacccaacataaagtttctcagtctttggcaagaaaacaaatactggaaccagtgacaggctggagtaaaagtccacataaagggtaacagctttctgttgtgacaggttcttgccttggcttagacaaagagaggaaagtgacgtgggtatcagcacaagtggctatattttaaatacagttaatagagtgctctatgcattctgctaacagaatggtaatttacaacatctgcttttcaaaggctagaaaataatagattgcctttcccccctcccgttctgtatcaatctgat

SEQ ID NO: 94139 - DNA, 600 bp, Chicken  19866894471775_2
ggtaacagctttctgttgtgacaggttcttgccttggcttagacaaagagaggaaagtgacgtgggtatcagcacaagtggctatattttaaatacagttaatagagtgctctatgcattctgctaacagaatggtaatttacaacatctgcttttcaaaggctagaaaataatagattgcctttcccccctcccgttctgtatcaatctgatcacgacattgtcctttaattacacaaacacccactacttttccacaggcctccatgggaatgtaaagagccagactgtaaagagctyggtatgtgcattcagccagccttcccatctgcacgtcgttacttattgcctcctactggaaactgatcacttcacagccaaaagctttaaaacagcaaacattactagatctgttcaccagtttgatttgaaaaagataattaagagataatgaggagatggatagaaaaacagacttgcttacccataaactccaccttttttttttcttgtgtgatgtttataaaattatttagtatttaatcagaagagcaaaaatatacgattgtctacaatgtgaatgtttagctttctctgaga

SEQ ID NO: 94140 - DNA, 599 bp, Chicken  19866894471777_1
  misc_feature (1)..(81): n is any nucleotide
nnnnnnnnnnnnnnnnnnnnnnnnnnnnnnnnnnnnnnnnnnnnnnnnnnnnnnnnnnnnnnnnnnnnnnnnnnnnnnnnntcttctgaagtgaataattttctgcagaacctgcattatctaaacagttttattctgtatctgtctgttgtcttgctacagatgttcttttgtttgcactggatgtggtaaggaattgtatgataaaaaaatacttatatactcatgtaaatgcaagctggtatcctgacaaacaaacataaaaggaactgctttaggcccatagagacaacctcactkcacgcatttgctgactttgctaaacttaaagaactgaaccttacaagtactggtcttcaaattctggtcttcttcctgtgcataacctcccagcttgcttttagcagagtagttgtgtccccagaggttttgtaacatagcatcatgtttgcatttatgtggtacctacaacatgcctggggccttaaaaactatttcacagctcrctgctactttaaataacatagtgaccactagtaatttctggcatccacaggaacctgggtgagagcagagggagaggcatctgtcaccagttg

SEQ ID NO: 94141 - DNA, 579 bp, Chicken  19866894471777_2
aaaaaatacttatatactcatgtaaatgcaagctggtatcctgacaaacaaacataaaaggaactgctttaggcccatagagacaacctcactkcacgcatttgctgactttgctaaacttaaagaactgaaccttacaagtactggtcttcaaattctggtcttcttcctgtgcataacctcccagcttgcttttagcagagtagttgtgtccccagaggttttgtaacatagcatcatgtttgcatttatgtggtacctacaacatgcctggggccttaaaaactatttcacagctcrctgctactttaaataacatagtgaccactagtaatttctggcatccacaggaacctgggtgagagcagagggagaggcatctgtcaccagttggtgcagcagagggatggagaagcccaggtgagccgggctctgcctggccacaggacagggagatggtctggtaagaagtgttgtttcacctcactgtttctcctgctggtttctttgttctttctgtgcttttggctcaggaaaagtctttggaggacatcttgtgtgcttctgcttcaatgtggt

SEQ ID NO: 94142 - DNA, 600 bp, Chicken  19866894471779_1
agcactgctacttctggacgttaacaggttttgtattaaaaagtggctggtgctatttctctgtttaaattacattatcagcagagtgaacagtagcctacgatgcaaatgtgttcttctgatcgtgtgccatttctctctgatttttatgtgctaggctcaccttcactgcctatcctagtatggtctcagctgcagtgaaggtctgctaagcaagtctgttgaagctctgatcttgcaatttgacaggagcaatgtggtatcctgcagtttgatatgcttactgggtgtttgcatatstaagtagattttgctgtcaccagtaaaaataatgcttcaaaatagtgtcatacctcgcattttgctatatttttcatgataatgaggaaattaaaaccctttcattttagacagatggtaggacaactctctgatttcagttgtagctttcagtattaaggtctttttttttttttttttaaatgaagacgctggaatatttgcttcacctgtatgcagagctctggctgattttctattaattattctttaaaaatgagaaatgaatgtgacaagctagtatctcttacataccgtatt

SEQ ID NO: 94143 - DNA, 600 bp, Chicken  19866894471790_1
tgaattttctcagactgggtgtgtgtttagtctttatcttttattagaaactataaattagttttcaaatacatttagcaaaaaaagggacaaaaccaaatttacattttaaaaaagtgtttttgtacattagagaaaagcaatttttcaataaagaaatatatcacttctacttcaggtaggtcatggtcatatattaagacttgtcacttgaactgaaaaagcatatttaaatgctttaattcaattcttttagaaacagaattctcaagggaaatgtttttcttctgataatagctmcacacttgataatctgatgtgttaacaaacatagatatgacatactctaaattttttaactatacttttgtcagaatatttaacagaattttgagctaagcacctttattattctgtttttaatgtatccagctaatcctgtttatctatggaggcaaaaagtctgatgttttaactccagatgactaaattcactcaatattcaagcttctgctcaacaaaaaccataacagtctaaaatcagtgaatggaagagtaggttgtgggatgcagagaattatctgagaagaattgttcaga

SEQ ID NO: 94144 - DNA, 600 bp, Chicken  19866894471792_1
catcacaaattgtaagatcccaggaccaattaggggggcagggaggaaggatgcctgacaccacaaccacagcacttgcatctgaatgaggactcagcataaccctgatcgacttttgcctagggaggtgacagggcctgaaatgggctttctgcttcttacacatcctccattatctgagacccactggggcgtgcacgtgttcttgcagagcttgatggaagggaactctgctgccaccctacctctgcacttcacctggatttctatcaagagtttgtgaaggaagggaaatgaaayatgagtctcttrcattacaggatagcacactatgaaactgggccactgttccactttggaatgtcataccaggctgcacaacttcagcagacgtgctagacagcaaccacctattgggcatggtacatcacactattcaaagtcccatcaaagacacaggataggacaagaggtaatttcctgaagctgtaccagrggaggctcaggttggatattaggaaaaatttctcaggaagagtgatcaggtgctggcacaggctgcccagggagtggtggagtcacgatycctggaggcattca

SEQ ID NO: 94145 - DNA, 600 bp, Chicken  19866894471792_2
taagatcccaggaccaattaggggggcagggaggaaggatgcctgacaccacaaccacagcacttgcatctgaatgaggactcagcataaccctgatcgacttttgcctagggaggtgacagggcctgaaatgggctttctgcttcttacacatcctccattatctgagacccactggggcgtgcacgtgttcttgcagagcttgatggaagggaactctgctgccaccctacctctgcacttcacctggatttctatcaagagtttgtgaaggaagggaaatgaaayatgagtctcttrcattacaggatagcacactatgaaactgggccactgttccactttggaatgtcataccaggctgcacaacttcagcagacgtgctagacagcaaccacctattgggcatggtacatcacactattcaaagtcccatcaaagacacaggataggacaagaggtaatttcctgaagctgtaccagrggaggctcaggttggatattaggaaaaatttctcaggaagagtgatcaggtgctggcacaggctgcccagggagtggtggagtcacgatycctggaggcattcaagaaacatggag

SEQ ID NO: 94146 - DNA, 600 bp, Chicken  19866894471792_3
cacgtgttcttgcagagcttgatggaagggaactctgctgccaccctacctctgcacttcacctggatttctatcaagagtttgtgaaggaagggaaatgaaayatgagtctcttrcattacaggatagcacactatgaaactgggccactgttccactttggaatgtcataccaggctgcacaacttcagcagacgtgctagacagcaaccacctattgggcatggtacatcacactattcaaagtcccatcaaagacacaggataggacaagaggtaatttcctgaagctgtaccagrggaggctcaggttggatattaggaaaaatttctcaggaagagtgatcaggtgctggcacaggctgcccagggagtggtggagtcacgatycctggaggcattcaagaaacatggagatgtggcacagaagacatkgttagtgggcatggtgaggatgggttggcagctggacttgatcttagaggtgttttccaaccttaatggttctgtgatagtagttcaaagtaacactgacacttcatcacaacaccattcaggataaggccctcagggacagcaccactgtgctgtaacacagct

SEQ ID NO: 94147 - DNA, 594 bp, Chicken  19866894471792_4
aagggaaatgaaayatgagtctcttrcattacaggatagcacactatgaaactgggccactgttccactttggaatgtcataccaggctgcacaacttcagcagacgtgctagacagcaaccacctattgggcatggtacatcacactattcaaagtcccatcaaagacacaggataggacaagaggtaatttcctgaagctgtaccagrggaggctcaggttggatattaggaaaaatttctcaggaagagtgatcaggtgctggcacaggctgcccagggagtggtggagtcacgatycctggaggcattcaagaaacatggagatgtggcacagaagacatkgttagtgggcatggtgaggatgggttggcagctggacttgatcttagaggtgttttccaaccttaatggttctgtgatagtagttcaaagtaacactgacacttcatcacaacaccattcaggataaggccctcagggacagcaccactgtgctgtaacacagctctgtgcttcagaagtagatcaggaatcccacactaggcttttgcagcacagatgagccataactccacctgcagtttcagtcca

SEQ ID NO: 94148 - DNA, 549 bp, Chicken  19866894471792_5
atgaaactgggccactgttccactttggaatgtcataccaggctgcacaacttcagcagacgtgctagacagcaaccacctattgggcatggtacatcacactattcaaagtcccatcaaagacacaggataggacaagaggtaatttcctgaagctgtaccagrggaggctcaggttggatattaggaaaaatttctcaggaagagtgatcaggtgctggcacaggctgcccagggagtggtggagtcacgatycctggaggcattcaagaaacatggagatgtggcacagaagacatkgttagtgggcatggtgaggatgggttggcagctggacttgatcttagaggtgttttccaaccttaatggttctgtgatagtagttcaaagtaacactgacacttcatcacaacaccattcaggataaggccctcagggacagcaccactgtgctgtaacacagctctgtgcttcagaagtagatcaggaatcccacactaggcttttgcagcacagatgagccataactccacctgcagtttcagtcca

SEQ ID NO: 94149 - DNA, 599 bp, Chicken  19866894471800_1
  misc_feature (1)..(192): n is any nucleotide
nnnnnnnnnnnnnnnnnnnnnnnnnnnnnnnnnnnnnnnnnnnnnnnnnnnnnnnnnnnnnnnnnnnnnnnnnnnnnnnnnnnnnnnnnnnnnnnnnnnnnnnnnnnnnnnnnnnnnnnnnnnnnnnnnnnnnnnnnnnnnnnnnnnnnnnnnnnnnnnnnnnnnnnnnnnnnnnnnnnnnnnnnnnnnnnncaaggcgatgggagtgcaaagcgaggcctgagcaacgccatggcttgcaagtgcattgcaattgcaatgatgcaatgcaacgggatgcaaatgcattgcagtgcagcygcaaagggccgcccgagcgacgcgatgcaacaccactgcaatgcracgccrctgcaatttgagcrcggtgcaatgcaaccrcaccacaatgcaacgcagccccaatgcaatgcagccacactgcagtgcaacagtgcaatgcaatgcaatgcagccacaaggcaatacaaccgcaccgcaatgcaatgcaatgcaactacaccacaatgcaacaatgcaatgcaaccacagcgcaatgcaacaatgcaatgcaaccacaccgcaatgcaatgcaatgcagccccaacgcaatgcaatga

SEQ ID NO: 94150 - DNA, 599 bp, Chicken  19866894471800_2
  misc_feature (1)..(147): n is any nucleotide
nnnnnnnnnnnnnnnnnnnnnnnnnnnnnnnnnnnnnnnnnnnnnnnnnnnnnnnnnnnnnnnnnnnnnnnnnnnnnnnnnnnnnnnnnnnnnnnnnnnnnnnnnnnnnnnnnnnnnnnnnnnnnnnnnnnnnnnnnnnnnnnnnnncaaggcgatgggagtgcaaagcgaggcctgagcaacgccatggcttgcaagtgcattgcaattgcaatgatgcaatgcaacgggatgcaaatgcattgcagtgcagcygcaaagggccgcccgagcgacgcgatgcaacaccactgcaatgcracgccrctgcaatttgagcrcggtgcaatgcaaccrcaccacaatgcaacgcagccccaatgcaatgcagccacactgcagtgcaacagtgcaatgcaatgcaatgcagccacaaggcaatacaaccgcaccgcaatgcaatgcaatgcaactacaccacaatgcaacaatgcaatgcaaccacagcgcaatgcaacaatgcaatgcaaccacaccgcaatgcaatgcaatgcagccccaacgcaatgcaatgacactgcaatgcaatgcaaccacaccacaatgcaacaattcartgc

SEQ ID NO: 94151 - DNA, 599 bp, Chicken  19866894471800_3
  misc_feature (1)..(141): n is any nucleotide
nnnnnnnnnnnnnnnnnnnnnnnnnnnnnnnnnnnnnnnnnnnnnnnnnnnnnnnnnnnnnnnnnnnnnnnnnnnnnnnnnnnnnnnnnnnnnnnnnnnnnnnnnnnnnnnnnnnnnnnnnnnnnnnnnnnnnnnnnnnnncaaggcgatgggagtgcaaagcgaggcctgagcaacgccatggcttgcaagtgcattgcaattgcaatgatgcaatgcaacgggatgcaaatgcattgcagtgcagcygcaaagggccgcccgagcgacgcgatgcaacaccactgcaatgcracgccrctgcaatttgagcrcggtgcaatgcaaccrcaccacaatgcaacgcagccccaatgcaatgcagccacactgcagtgcaacagtgcaatgcaatgcaatgcagccacaaggcaatacaaccgcaccgcaatgcaatgcaatgcaactacaccacaatgcaacaatgcaatgcaaccacagcgcaatgcaacaatgcaatgcaaccacaccgcaatgcaatgcaatgcagccccaacgcaatgcaatgacactgcaatgcaatgcaaccacaccacaatgcaacaattcartgcaatcac

SEQ ID NO: 94152 - DNA, 599 bp, Chicken  19866894471800_4
  misc_feature (1)..(127): n is any nucleotide
nnnnnnnnnnnnnnnnnnnnnnnnnnnnnnnnnnnnnnnnnnnnnnnnnnnnnnnnnnnnnnnnnnnnnnnnnnnnnnnnnnnnnnnnnnnnnnnnnnnnnnnnnnnnnnnnnnnnnnnnnnnnnnncaaggcgatgggagtgcaaagcgaggcctgagcaacgccatggcttgcaagtgcattgcaattgcaatgatgcaatgcaacgggatgcaaatgcattgcagtgcagcygcaaagggccgcccgagcgacgcgatgcaacaccactgcaatgcracgccrctgcaatttgagcrcggtgcaatgcaaccrcaccacaatgcaacgcagccccaatgcaatgcagccacactgcagtgcaacagtgcaatgcaatgcaatgcagccacaaggcaatacaaccgcaccgcaatgcaatgcaatgcaactacaccacaatgcaacaatgcaatgcaaccacagcgcaatgcaacaatgcaatgcaaccacaccgcaatgcaatgcaatgcagccccaacgcaatgcaatgacactgcaatgcaatgcaaccacaccacaatgcaacaattcartgcaatcacacctcgatgcaacc

SEQ ID NO: 94153 - DNA, 599 bp, Chicken  19866894471800_5
  misc_feature (1)..(111): n is any nucleotide
nnnnnnnnnnnnnnnnnnnnnnnnnnnnnnnnnnnnnnnnnnnnnnnnnnnnnnnnnnnnnnnnnnnnnnnnnnnnnnnnnnnnnnnnnnnnnnnnnnnnnnnnnnnnnnncaaggcgatgggagtgcaaagcgaggcctgagcaacgccatggcttgcaagtgcattgcaattgcaatgatgcaatgcaacgggatgcaaatgcattgcagtgcagcygcaaagggccgcccgagcgacgcgatgcaacaccactgcaatgcracgccrctgcaatttgagcrcggtgcaatgcaaccrcaccacaatgcaacgcagccccaatgcaatgcagccacactgcagtgcaacagtgcaatgcaatgcaatgcagccacaaggcaatacaaccgcaccgcaatgcaatgcaatgcaactacaccacaatgcaacaatgcaatgcaaccacagcgcaatgcaacaatgcaatgcaaccacaccgcaatgcaatgcaatgcagccccaacgcaatgcaatgacactgcaatgcaatgcaaccacaccacaatgcaacaattcartgcaatcacacctcgatgcaacctcactgcaatgcaacc

SEQ ID NO: 94154 - DNA, 564 bp, Chicken  19866894471800_6
tgcracgccrctgcaatttgagcrcggtgcaatgcaaccrcaccacaatgcaacgcagccccaatgcaatgcagccacactgcagtgcaacagtgcaatgcaatgcaatgcagccacaaggcaatacaaccgcaccgcaatgcaatgcaatgcaactacaccacaatgcaacaatgcaatgcaaccacagcgcaatgcaacaatgcaatgcaaccacaccgcaatgcaatgcaatgcagccccaacgcaatgcaatgacactgcaatgcaatgcaaccacaccacaatgcaacaattcartgcaatcacacctcgatgcaacctcactgcaatgcaaccacgctgcaatgcaatgcaaccacaactcaatgcaaccacaccgcaacgcaacaatgcaatgcaaccacaccgcaatgcaaccacaccgcaacgcaacaatgcaatgcagccccaatgcaccgcaatggagccccattgcaatgcaaccacactgcaatgcagccccactgcaatgcaagctcactgcaatgcaacaatacaatgcaatgcaatgcagccccaatg

SEQ ID NO: 94155 - DNA, 599 bp, Chicken  19866894471809_1
  misc_feature (1)..(31): n is any nucleotide
nnnnnnnnnnnnnnnnnnnnnnnnnnnnnnnctgcatgcagtttccctggaagttccattaaccaatatgttttgctatcctttctcagacactgtccaacagcattcagtttctcattctcctttcatgacctggcagttaaactcacagaaacttattattttttttctaatagtataactgttaaaactagtgacgcagaccactagaactgtcagtcttagcagtgattttgtagtttctcaggtgctctcatgaaagagtaataataatatggggactaccattaagatgaaaamgctacgaagattcattctttcaaaagagtctagtgtaggcaggacatcaatatatgaaatcacaatcacccttctgtcttcctgcagagtaatggctcagaaacaatccaacgcagagtatgctcaggtacctaatgaagaaaatacacctgcaaccgcagttctaccaagcaatgcgacaaatgaacaacctagtgctgatgaagcagcagcryctgaaacaccagaaaaygatgagaagcatgaagtgcaaaaagaagaaacagcgggaagttcattttagtacagttttcctcatt

SEQ ID NO: 94156 - DNA, 547 bp, Chicken  19866894471809_2
gtcagtcttagcagtgattttgtagtttctcaggtgctctcatgaaagagtaataataatatggggactaccattaagatgaaaamgctacgaagattcattctttcaaaagagtctagtgtaggcaggacatcaatatatgaaatcacaatcacccttctgtcttcctgcagagtaatggctcagaaacaatccaacgcagagtatgctcaggtacctaatgaagaaaatacacctgcaaccgcagttctaccaagcaatgcgacaaatgaacaacctagtgctgatgaagcagcagcryctgaaacaccagaaaaygatgagaagcatgaagtgcaaaaagaagaaacagcgggaagttcattttagtacagttttcctcattggctttggatcacattataaaaaacaaacaaacaaacaaacaaraaaccaaaaaacgtcactgaattaacatagcattgtagctaaactcatttgtattgcgaaccactggactgcagattgaaaaggatggtacagacatacttcatgaacagcagatttg

SEQ ID NO: 94157 - DNA, 546 bp, Chicken  19866894471809_3
tcagtcttagcagtgattttgtagtttctcaggtgctctcatgaaagagtaataataatatggggactaccattaagatgaaaamgctacgaagattcattctttcaaaagagtctagtgtaggcaggacatcaatatatgaaatcacaatcacccttctgtcttcctgcagagtaatggctcagaaacaatccaacgcagagtatgctcaggtacctaatgaagaaaatacacctgcaaccgcagttctaccaagcaatgcgacaaatgaacaacctagtgctgatgaagcagcagcryctgaaacaccagaaaaygatgagaagcatgaagtgcaaaaagaagaaacagcgggaagttcattttagtacagttttcctcattggctttggatcacattataaaaaacaaacaaacaaacaaacaaraaaccaaaaaacgtcactgaattaacatagcattgtagctaaactcatttgtattgcgaaccactggactgcagattgaaaaggatggtacagacatacttcatgaacagcagatttg

SEQ ID NO: 94158 - DNA, 529 bp, Chicken  19866894471809_4
tttgtagtttctcaggtgctctcatgaaagagtaataataatatggggactaccattaagatgaaaamgctacgaagattcattctttcaaaagagtctagtgtaggcaggacatcaatatatgaaatcacaatcacccttctgtcttcctgcagagtaatggctcagaaacaatccaacgcagagtatgctcaggtacctaatgaagaaaatacacctgcaaccgcagttctaccaagcaatgcgacaaatgaacaacctagtgctgatgaagcagcagcryctgaaacaccagaaaaygatgagaagcatgaagtgcaaaaagaagaaacagcgggaagttcattttagtacagttttcctcattggctttggatcacattataaaaaacaaacaaacaaacaaacaaraaaccaaaaaacgtcactgaattaacatagcattgtagctaaactcatttgtattgcgaaccactggactgcagattgaaaaggatggtacagacatacttcatgaacagcagatttg

SEQ ID NO: 94159 - DNA, 418 bp, Chicken  19866894471809_5
acatcaatatatgaaatcacaatcacccttctgtcttcctgcagagtaatggctcagaaacaatccaacgcagagtatgctcaggtacctaatgaagaaaatacacctgcaaccgcagttctaccaagcaatgcgacaaatgaacaacctagtgctgatgaagcagcagcryctgaaacaccagaaaaygatgagaagcatgaagtgcaaaaagaagaaacagcgggaagttcattttagtacagttttcctcattggctttggatcacattataaaaaacaaacaaacaaacaaacaaraaaccaaaaaacgtcactgaattaacatagcattgtagctaaactcatttgtattgcgaaccactggactgcagattgaaaaggatggtacagacatacttcatgaacagcagatttg

SEQ ID NO: 94160 - DNA, 600 bp, Chicken  19866894471813_1
ctaccccacatcacgggctgctggctgtattaaaaataaatcaatgctaatgcagtcaagcgtttaaaaacaaaagcacagtagagcagtgtggtattttaattcagacccaggctgctctctgcattttgggggagtgagctgggggggctccgcgggcattgctgtgtccaactcccactgggggtgcaggcagggcagagctcacagcccgctgagtgtcaccctgcagagctgagtgaggagcacacctcactgctcgtgctctgggtttattctcaacgctgaacaagacaaagyggctcctgtcatcacttccaaattcaacagaagctgcaatatggaaaaagagagggaggaaaaaaaacaaccaccaaaaccagaaatagctgcagtgctttctgacgtcctttcgacactcaaagccaaaaggctttgcaggctgctgactccaacacgaacccytacctagcagcwctgcgccctgcaaagtgcagcacgctgctctcgtgctcatttctgcaatgggtggacataaagtgtcagtaacacagatacagccctacacgtgggtaccctcacacacacacrggtacccct

SEQ ID NO: 94161 - DNA, 600 bp, Chicken  19866894471813_2
cgtttaaaaacaaaagcacagtagagcagtgtggtattttaattcagacccaggctgctctctgcattttgggggagtgagctgggggggctccgcgggcattgctgtgtccaactcccactgggggtgcaggcagggcagagctcacagcccgctgagtgtcaccctgcagagctgagtgaggagcacacctcactgctcgtgctctgggtttattctcaacgctgaacaagacaaagyggctcctgtcatcacttccaaattcaacagaagctgcaatatggaaaaagagagggaggyaaaaaaacaaccaccaaaaccagaaatagctgcagtgctttctgacgtcctttcgacactcaaagccaaaaggctttgcaggctgctgactccaacacgaacccytacctagcagcwctgcgccctgcaaagtgcagcacgctgctctcgtgctcatttctgcaatgggtggacataaagtgtcagtaacacagatacagccctacacgtgggtaccctcacacacacacrggtacccctttgccagacttaaagagccttaaagatgygccctccatggagcacaatgacctgaagaag

SEQ ID NO: 94162 - DNA, 600 bp, Chicken  19866894471813_3
tgtgtccaactcccactgggggtgcaggcagggcagagctcacagcccgctgagtgtcaccctgcagagctgagtgaggagcacacctcactgctcgtgctctgggtttattctcaacgctgaacaagacaaagyggctcctgtcatcacttccaaattcaacagaagctgcaatatggaaaaagagagggaggaaaaaaaacaaccaccaaaaccagaaatagctgcagtgctttctgacgtcctttcgacactcaaagccaaaaggctttgcaggctgctgactccaacacgaacccytacctagcagcwctgcgccctgcaaagtgcagcacgctgctctcgtgctcatttctgcaatgggtggacataaagtgtcagtaacacagatacagccctacacgtgggtaccctcacacacacacrggtacccctttgccagacttaaagagccttaaagatgygccctccatggagcacaatgacctgaagaagcagtgcttagggatgctctgtcctgtcccagcccagcgcccagcctgtttgctttctgaatcgattcctcttgagaaaagccccgctgcctactttttgtgcctg

SEQ ID NO: 94163 - DNA, 600 bp, Chicken  19866894471813_4
ccactgggggtgcaggcagggcagagctcacagcccgctgagtgtcaccctgcagagctgagtgaggagcacacctcactgctcgtgctctgggtttattctcaacgctgaacaagacaaagyggctcctgtcatcacttccaaattcaacagaagctgcaatatggaaaaagagagggaggaaaaaaaacaaccaccaaaaccagaaatagctgcagtgctttctgacgtcctttcgacactcaaagccaaaaggctttgcaggctgctgactccaacacgaacccytacctagcagcwctgcgccctgcaaagtgcagcacgctgctctcgtgctcatttctgcaatgggtggacataaagtgtcagtaacacagatacagccctacacgtgggtaccctcacacacacacrggtacccctttgccagacttaaagagccttaaagatgygccctccatggagcacaatgacctgaagaagcagtgcttagggatgctctgtcctgtcccagcccagcgcccagcctgtttgctttctgaatcgattcctcttgagaaaagccccgctgcctactttttgtgcctgtctgcctttcct

SEQ ID NO: 94164 - DNA, 490 bp, Chicken  19866894471813_5
agacaaagyggctcctgtcatcacttccaaattcaacagaagctgcaatatggaaaaagagagggaggaaaaaaaacaaccaccaaaaccagaaatagctgcagtgctttctgacgtcctttcgacactcaaagccaaaaggctttgcaggctgctgactccaacacgaacccytacctagcagcwctgcgccctgcaaagtgcagcacgctgctctcgtgctcatttctgcaatgggtggacataaagtgtcagtaacacagatacagccctacacgtgggtaccctcacacacacacrggtacccctttgccagacttaaagagccttaaagatgygccctccatggagcacaatgacctgaagaagcagtgcttagggatgctctgtcctgtcccagcccagcgcccagcctgtttgctttctgaatcgattcctcttgagaaaagccccgctgcctactttttgtgcctgtctgcctttccttcct

SEQ ID NO: 94165 - DNA, 452 bp, Chicken  19866894471813_6
gaagctgcaatatggaaaaagagagggaggaaaaaaaacaaccaccaaaaccagaaatagctgcagtgctttctgacgtcctttcgacactcaaagccaaaaggctttgcaggctgctgactccaacacgaacccytacctagcagcwctgcgccctgcaaagtgcagcacgctgctctcgtgctcatttctgcaatgggtggacataaagtgtcagtaacacagatacagccctacacgtgggtaccctcacacacacacrggtacccctttgccagacttaaagagccttaaagatgygccctccatggagcacaatgacctgaagaagcagtgcttagggatgctctgtcctgtcccagcccagcgcccagcctgtttgctttctgaatcgattcctcttgagaaaagccccgctgcctactttttgtgcctgtctgcctttccttcct

SEQ ID NO: 94166 - DNA, 600 bp, Chicken  19866894471820_1
cctttgtggggtagatgagaatttaaatggtttaagcaaagttacaaaagaaaatgtaatggtatttggaacttttaaaacaattgacttttcacatgtcattctgagctcagctcagaggccagcctttcaccatcaatctcccccagccatctctcaatacaacacaaacaagattagacttttgttgctgtctcaaagtcaaacagggtcatccacagcagacaaagactgaaagtgtttttttaattttttttactctttactttctccttatcctctgataaggttcgttctttytcaactacattccagattgaggaaaatatttttctttctcacttctttaagacctttagaggtttttcctcttcttttggttgtgagcctaccaggggagctgctccattatacctgctgttcacagagaaggatcggtgggagacgtggagataggcagctgtttcggacaaagtgaccatgaaatagtagagatctcaatttctgggcgaagtcaggaggggggccagcaaaactactactttagatttccagagggtgaactttgaactgctcaggacaatggtagggagggttcct

SEQ ID NO: 94167 - DNA, 600 bp, Chicken  19866894471824_1
tccattttcctcatacattagttctaggtagaaacaaagaactgaagttacacatcacgtaagtgactactaagcagaggattaaaaaaaaccctcagttctctatcatttcttttgatttaaatgtgaagacgtattacaattgtgttttgggttgaaaggaaaaacaaactgcagaattatgcctgaaaaatatttcacatactgtgtttttggagtgccaaagctagaaagttattttgtattactcctcttcaggtagtgcctcttctatgatctgcctctgcactacacaccacrgcttatgttctaccacagtgttttcatgacagacatctggtcctaaaaagatagcactggaaatggagatgcatcatttctcttggatgttaagctccaatgcttcatcttatttattttatgctttatttttggatttctgctattttaactgtcatatggcttgtgttctttctttcatgtctacaacagaagtacatcagtacaacatcttcagaaagatacttagaactaccaactttaaatttaattgtcttattggtaagctaagtatatatatatatatatatatatatatat

SEQ ID NO: 94168 - DNA, 596 bp, Chicken  19866894471825_1
accttattgcttgctaattgcactgcccaagcaagatgtatgcagagcaaggatgtgtgcagatagctgggttctctgcacttttaaatgtctggcttccttcatctcaggtcagcacacacagcacagtgcatcgagggattaaaaagctgtggaccagaatggtatgttttgaagtggcactttttccatttgtcacttgattactttctatttatgttaattacaacacatctcaatacaccacctcattaggacagcagacagtttggtgttgttgacaaagaatcgtgtgatacytatggacaaccatttacaacaatatcacatggatcagcagcaaagtgaaatggatggaaaacatcactctttcygggctcctggaaagcttttcttttgagtgtaggctatgcttcctacatctggagaaggcagcaagctatctgtgattaagataaatggatagaatttacttttaatttcctacatataagccagaccccaacgattacatctacgctggtgtggatttattgtcctataaatgagagattgtatcacctaagctgggattcctatctcaaatattgagctaa

SEQ ID NO: 94169 - DNA, 522 bp, Chicken  19866894471825_2
tctgcacttttaaatgtctggcttccttcatctcaggtcagcacacacagcacagtgcatcgagggattaaaaagctgtggaccagaatggtatgttttgaagtggcactttttccatttgtcacttgattactttctatttatgttaattacaacacatctcaatacaccacctcattaggacagcagacagtttggtgttgttgacaaagaatcgtgtgatacytatggacaaccatttacaacaatatcacatggatcagcagcaaagtgaaatggatggaaaacatcactctttcygggctcctggaaagcttttcttttgagtgtaggctatgcttcctacatctggagaaggcagcaagctatctgtgattaagataaatggatagaatttacttttaatttcctacatataagccagaccccaacgattacatctacgctggtgtggatttattgtcctataaatgagagattgtatcacctaagctgggattcctatctcaaatattgagctaa

SEQ ID NO: 94170 - DNA, 599 bp, Chicken  19866894471826_1
  misc_feature (1)..(164): n is any nucleotide
nnnnnnnnnnnnnnnnnnnnnnnnnnnnnnnnnnnnnnnnnnnnnnnnnnnnnnnnnnnnnnnnnnnnnnnnnnnnnnnnnnnnnnnnnnnnnnnnnnnnnnnnnnnnnnnnnnnnnnnnnnnnnnnnnnnnnnnnnnnnnnnnnnnnnnnnnnnnnnnnnnnntgccaggtcctgcactttgacccccaacaacccccaggcaacactacaggcttggggcagagcgactggaaagactgtatagacgaacccagacctgtggggtattagtcaatgcttggctgaatatgagccagcwgtgtgcccaggtggcccaagaaggccaatggcatcctggcttgtatcagaaatagtgttgccagctggagcagggaagtgattatccctctgtactcagctctggtgaggctgaacctcaagtactgtgttcagttttgagcccctcagtacaagaaagacactgacaccctggagtgagttcagagaagggcaacaaagctggtgaagagtctggaggacaagtcttgtgaggagtggctgaaggaactggcattatttagtctggagaagaggaggcccagaggtgaccatattgct

SEQ ID NO: 94171 - DNA, 600 bp, Chicken  19866894471827_1
tcccctccaagttaaaaattccctcaatgatacagtttgggaaagctggaccggaggaaataagaaaggacttgtgtaacctgcacactatttcagtcgtcaatctcacaaaatctgtacattctgaaaacctgtaacgtagatatgctgaagtaaggcagcttttccttcctcacctaatttaaattcacaaatattttgtctagtagctagagtgtttcccttatctgaaataatgaccatttttttgtgtaatattatacacttaggaaatgtatcctcaagtatatagtgaagggkttttttttctaagtttgttttttctttcaacatttcatcaatggatagtgaactgctgggcccacagagatctccagaccaccagctcatgtatttgaaaggcatctgtttatttttaaaatgcaaatgtagcctacctcaaagactgacttgcaagaaatgaacaatctgaacaagtcaagaggtttccaatcaggagctgtgttcctcctttatatcaggctatgatcacttgctgccaaaaccacttaaacaatatcctggaatctgaatgaagtccccccacaattaaaatgagca

SEQ ID NO: 94172 - DNA, 600 bp, Chicken  19866894471836_1
aagaccatgaagatcatccagtccaacaatcaacccatcaccaacataccaactaaaccatgttcctcataatgtttcaatgcaatgcaatcaaagcagctggaagtggtgactgggccaggtcagattcaaccatgctgcaagatcagtcagcagatgaacagctggaactgcaccacaggtagaggtaaggatattttctaaggcagtagtttcccattcccagctgataaatctgagtccaattgtataataaccctttcctacattttgatgtatctgaccacagtgccagtcacktgtttccctgattctctgttaatggtaaacatggggaagcctacttactgcactagccagtgttctgtgagacttgggaatccttgcaaatccaacttcataactctgtcagcgcaagcggttgctttggaagatatattcaaatgcatcccaaacgcaacttttcttctgttgggcttatgtgkcttgtctaaatctggattrttctgcaaattcatcacttcaacaagyggttaaaacttggactactctaggttgttgtagtccttatgcataaaagagtgtgccattagaaatcga

SEQ ID NO: 94173 - DNA, 600 bp, Chicken  19866894471836_2
agaccatgaagatcatccagtccaacaatcaacccatcaccaacataccaactaaaccatgttcctcataatgtttcaatgcaatgcaatcaaagcagctggaagtggtgactgggccaggtcagattcaaccatgctgcaagatcagtcagcagatgaacagctggaactgcaccacaggtagaggtaaggatattttctaaggcagtagtttcccattcccagctgataaatctgagtccaattgtataataaccctttcctacattttgatgtatctgaccacagtgccagtcacakgtttccctgattctctgttaatggtaaacatggggaagcctacttactgcactagccagtgttctgtgagacttgggaatccttgcaaatccaacttcataactctgtcagcgcaagcggttgctttggaagatatattcaaatgcatcccaaacgcaacttttcttctgttgggcttatgtgkcttgtctaaatctggattrttctgcaaattcatcacttcaacaagyggttaaaacttggactactctaggttgttgtagtccttatgcataaaagagtgtgccattagaaatcgag

SEQ ID NO: 94174 - DNA, 600 bp, Chicken  19866894471836_3
aggtaaggatattttctaaggcagtagtttcccattcccagctgataaatctgagtccaattgtataataaccctttcctacattttgatgtatctgaccacagtgccagtcacatgtttccctgattctctgttaatggtaaacatggggaagcctacttactgcactagccagtgttctgtgagacttgggaatccttgcaaatccaacttcataactctgtcagcgcaagcggttgctttggaagatatattcaaatgcatcccaaacgcaacttttcttctgttgggcttatgtgkcttgtctaaatctggattrttctgcaaattcatcacttcaacaagyggttaaaacttggactactctaggttgttgtagtccttatgcataaaagagtgtgccattagaaatcgagcataaaggatttgaaaaatcaatagaaagactggttgattaaattactggtaacaccaaagtgaacatgcaaacactggactgcactgcgttacttggttcaacgagttcaattccttccaattataaataagtgtgtaatgactgtgtagtataggaagatccacagaacatctattccacct

SEQ ID NO: 94175 - DNA, 600 bp, Chicken  19866894471836_4
ggcagtagtttcccattcccagctgataaatctgagtccaattgtataataaccctttcctacattttgatgtatctgaccacagtgccagtcacatgtttccctgattctctgttaatggtaaacatggggaagcctacttactgcactagccagtgttctgtgagacttgggaatccttgcaaatccaacttcataactctgtcagcgcaagcggttgctttggaagatatattcaaatgcatcccaaacgcaacttttcttctgttgggcttatgtgkcttgtctaaatctggattrttctgcaaattcatcacttcaacaagyggttaaaacttggactactctaggttgttgtagtccttatgcataaaagagtgtgccattagaaatcgagcataaaggatttgaaaaatcaatagaaagactggttgattaaattactggtaacaccaaagtgaacatgcaaacactggactgcactgcgttacttggttcaacgagttcaattccttccaattataaataagtgtgtaatgactgtgtagtataggaagatccacagaacatctattccacctgccttcacaagtcaacaaa

SEQ ID NO: 94176 - DNA, 600 bp, Chicken  19866894471836_5
aaatctgagtccaattgtataataaccctttcctacattttgatgtatctgaccacagtgccagtcacatgtttccctgattctctgttaatggtaaacatggggaagcctacttactgcactagccagtgttctgtgagacttgggaatccttgcaaatccaacttcataactctgtcagcgcaagcggttgctttggaagatatattcaaatgcatcccaaacgcaacttttcttctgttgggcttatgtgkcttgtctaaatctggattrttctgcaaattcatcacttcaacaagyggttaaaacttggactactctaggttgttgtagtccttatgcataaaagagtgtgccattagaaatcgagcataaaggatttgaaaaatcaatagaaagactggttgattaaattactggtaacaccaaagtgaacatgcaaacactggactgcactgcgttacttggttcaacgagttcaattccttccaattataaataagtgtgtaatgactgtgtagtataggaagatccacagaacatctattccacctgccttcacaagtcaacaaaccagcctgtaatcagacttacactcac

SEQ ID NO: 94177 - DNA, 600 bp, Chicken  19866894471855_1
aaagagataatctgggattcaaatgctatcatttgaccatcttgaccactgtattgttctgatatcaataccaatttttttttttttgattacttgatgttgattgaagtaaatgatcagtattaagttggaatggagaaacagataaatgtttatcaaattttgagtaaaactgtataattcaaagcaattaatgttttcttatttgatagcaaattacagtttttacagttttaccaagtaatgagatactatcatgcatggattgtagaatggatgtatattttacaaaggtgacakgatacaaattccctaagtggtattcattttatctgcaggcagtagacctcccatacattgtttcaactggagctgaaataggcgggaattcagtattaatgactacagtagtacatagatagtattacatttactgaagattgaaaactatttgttggcaagaaggacagagcattgatccagcagctaagcaaagctgacaatgatttacggaaaggctgtattaagatccactcagaaactattcttcctcggctctgaatagccacatttctttcatagtagattgaagactcccta

SEQ ID NO: 94178 - DNA, 573 bp, Chicken  19866894471866_1
tgcttctgatttgtgctgtcatttataatgtgtaagcaatttttttcttcagacagctttcgcaaccttagagcaaatgagtagcagacaggcttacttttaacaaagcatagctcaaattgttatttttttaaaaataggattcatatttttctgcaaatccctcttaattccttgcagatgtttgttgtgttttgccacatctccaaatggaagcacttgatccttaaaaggagataacctcacaccactagcaaatgattgcctacatacaacagcctgttaaaggtagaggaaaarctcttcacttgctttcatagttcacgtccaagaccygtgctgtctacagctaagttggtgtgaatgaaagggacatggaggcagggctggaaaagtattcagagatgctgagttttgtataatttcaacatctgcgtgtcttgggttcccgccctttcaaaatctggtttgcagacacggtgtcccaatccttattgacagtgtaacacaaaactgatttgttttgtgcacccgtcctagtatggcacttacatgtgaatttgttccttccag

SEQ ID NO: 94179 - DNA, 537 bp, Chicken  19866894471866_2
caatttttttcttcagacagctttcgcaaccttagagcaaatgagtagcagacaggcttacttttaacaaagcatagctcaaattgttatttttttaaaaataggattcatatttttctgcaaatccctcttaattccttgcagatgtttgttgtgttttgccacatctccaaatggaagcacttgatccttaaaaggagataacctcacaccactagcaaatgattgcctacatacaacagcctgttaaaggtagaggaaaarctcttcacttgctttcatagttcacgtccaagaccygtgctgtctacagctaagttggtgtgaatgaaagggacatggaggcagggctggaaaagtattcagagatgctgagttttgtataatttcaacatctgcgtgtcttgggttcccgccctttcaaaatctggtttgcagacacggtgtcccaatccttattgacagtgtaacacaaaactgatttgttttgtgcacccgtcctagtatggcacttacatgtgaatttgttccttccag

SEQ ID NO: 94180 - DNA, 600 bp, Chicken  19866894471884_1
gcactgtattttactagctatttcctcattcagtcagtgtcataaagtccttctgcagccccttgcagtcaacccttaacgtcctcatccctaagcattctctgatgatttttctcaactcactgctcactctcccagatcatgcatgggtatagcaaacagccttgacttgtgtgagactccaccaatgacttcactccgtggccacagttctgcatccattttaccttccccaagggctggcatctcttataacaatcaatggaggcttcttcattttcagtcaatcttccttttaaytggctttagtaattacatcattcaagtatttatggctgtaatgagcataagggacaacagattcaccggagaacctgtagatcttataatttatattacagccacctgctggcttcgatcagaaggcaaaccctcatccactgctccacatcacctttgagttcaataaagcttttcacagaactccacgtgctcctcctgaaggattcgttcttccacaagaccagaagtttaaacttctccaatcatttattgccactgttaattgattttgtaaatacagcaccagcaaacagccat

SEQ ID NO: 94181 - DNA, 600 bp, Chicken  19866894471911_1
ttgtaaagcagacagacgtacccttggaatgaaatgcagcagactcactgacccggaggtttttttctctttctgaatctatagttctgatgagacctatgggagtttggacttcaaagcaatgcaacatcatgccaattataagcccataccaaccaatgtagaactaatcccccaggcaatccatacagacatccatcactaatggagacagctgctgaaattgctgggcttccgttgaccatctcagtgatgtaacatctggctgctgtggggacagaggactgcatgtctagatcycctgtgacacagctggcaattcgtgaaggtagtacagcatccttaagtctttttccttccataaatccacatctgagatacatttaaaccatgagactcagcactgacctatgtaactttctaaaagaagagggcatgcaataaacaagaaggttagaagaaagagaccagcgaagttctacagcttagaaagtttaaagtctaacaacccctttctaggaaaacaaacaaacaaaataaaacacaccagtgctaaataggcatgcagtggttttgtataatctattctttgacaccatt

SEQ ID NO: 94182 - DNA, 600 bp, Chicken  19866894471911_2
ctgaagatgctggtcagagctgcgtggctttgtttaagaacacatgtactgctttgtagcttgggaaagaaaaattgattttctagacactgctataaaacatgccaagaaacaagtgtaagccagacaaagcacaaactatatcaagacagcaaagcatccaaaattttccatgtatgcctatttatggagggaaggaattatcctatgattaacttagctcccactgtcacagttcaacagacaagaaacattcataggaagcagaactgagtgttaaaactgatgtgcacagaggtkgagtggagctgccgagygcccaaacgactggtttgaatctgaggaacagaaagccctgctgccataacctgcaagcccaggagtggagacagtttgttatagaaacagaggagggaaggaaaggccggttatgtgcaaatactttgatgctgctagttattacagggcaaaacaggtgcataaccacgacctttcagtgagcccaaaggaactaagttcatttatagatatattacatcagattgcactatacagtcttactgaagaatatttttttattatcttatcttaataagaatt

SEQ ID NO: 94183 - DNA, 600 bp, Chicken  19866894471911_3
agctgcgtggctttgtttaagaacacatgtactgctttgtagcttgggaaagaaaaattgattttctagacactgctataaaacatgccaagaaacaagtgtaagccagacaaagcacaaactatatcaagacagcaaagcatccaaaattttccatgtatgcctatttatggagggaaggaattatcctatgattaacttagctcccactgtcacagttcaacagacaagaaacattcataggaagcagaactgagtgttaaaactgatgtgcacagaggtkgagtggagctgccgagygcccaaacgactggtttgaatctgaggaacagaaagccctgctgccataacctgcaagcccaggagtggagacagtttgttatagaaacagaggagggaaggaaaggccggttatgtgcaaatactttgatgctgctagttattacagggcaaaacaggtgcataaccacgacctttcagtgagcccaaaggaactaagttcatttatagatatattacatcagattgcactatacagtcttactgaagaatatttttttattatcttatcttaataagaattatcttattgaagaatat

SEQ ID NO: 94184 - DNA, 600 bp, Chicken  19866894471924_1
agtggggctgctccaacagccaggaaggtagacatcactactgcctgttgtcagaaactctgagacaccatgtgagtaaactggagaactgagattcacagaccagataagagttctcttaccaaagccttaggtgccttgggaagtgcacaaagttaatgcttgtggtatcagtccttcagaaatgacccaaagttcatatacccccacacagctctaactcacctaggcatgaatgaaaccaaataaatatgcctttaattagcacagggaaaagtggggaacagtcacaagagatgwtctcatcacagtgtaacatttttcaatgcctagtcaagcagtgctgagcacaccagggattttctgtggaggagagagggttaaatctccttttgggtgtgcctccctcagcaatgtgctaagtgctgcattttctctgggggtttttcccacagatttacagcttctagctataattgatcagccatgtacagatcacataaactattaaaaggaatgaagtataaacaagtggaaaacgtcatcagaagctgggaaaaattgaacaagaaagtgtagatcagttacttccgttctctg

SEQ ID NO: 94185 - DNA, 600 bp, Chicken  19866894471933_1
agaagctggcatccatccatgtgcaaccttcggtgctgagaaccactccaagcagggcagcacagcgagcttcatgcaacagaatgaaaaaaaaaaaaaaggaaaaaaaaaaaacagaaaaacaacaaaaagaattgttttattcataggtttgagcaaataacatgtcagcaaatagttgtgtaactcatctgttgtatggtatttatcctcgctgcaaggatattgtgcaagaaatctgtgtgaagtcgtgcctgtgctgggcagagcgaagctgaaggccccagggcagggcagcayrcatgccagcagccgtacgctctgggtgaagacaaggtgcgtgggaaaggcccaaatcatgtctgccaggatgttcctgctgcgttttctcatggtgcagcagggagccactttggtttttacagggctcagaagtatgggatgttttttcttcacacgtacgtttgatgacggatagaaacaatgaaggttttgttaatcgtggaaatgtttgtataagatgagaaactatttaggccctgtttctgtgcctactctgtgacaaatgaagctgaagtttcctggttgcttctggtggga

SEQ ID NO: 94186 - DNA, 600 bp, Chicken  19866894471933_2
gaagctggcatccatccatgtgcaaccttcggtgctgagaaccactccaagcagggcagcacagcgagcttcatgcaacagaatgaaaaaaaaaaaaaaggaaaaaaaaaaaacagaaaaacaacaaaaagaattgttttattcataggtttgagcaaataacatgtcagcaaatagttgtgtaactcatctgttgtatggtatttatcctcgctgcaaggatattgtgcaagaaatctgtgtgaagtcgtgcctgtgctgggcagagcgaagctgaaggccccagggcagggcagcayrcatgccagcagccgtacgctctgggtgaagacaaggtgcgtgggaaaggcccaaatcatgtctgccaggatgttcctgctgcgttttctcatggtgcagcagggagccactttggtttttacagggctcagaagtatgggatgttttttcttcacacgtacgtttgatgacggatagaaacaatgaaggttttgttaatcgtggaaatgtttgtataagatgagaaactatttaggccctgtttctgtgcctactctgtgacaaatgaagctgaagtttcctggttgcttctggtgggaa

SEQ ID NO: 94187 - DNA, 600 bp, Chicken  19866894471934_1
ccaatcacttcaccagttagtaatgatgtttacaagggttaggtccatgaagaaagatcctctgcttacagctacagagctgctatataacaatatcagagaattccctctagtgggaacaattcatacagcaggttgttacccgcatgaaaatgataatgaaaaaggctccactgacaaaaaattatttattctttttctaatataaccaatacttaaatctgcagttggcagggctgtatcagccaagaaggatgagaaaagctatgatctgccagctgatggacgactgctccgccmagctttcagcactcaaaaacactgcagaaccgggatgaagtcacttacctccctagttttcatacataaagttcaactaagctaagctgccctttgtcatcataatgacaacagagaggagagctgcccattcattctagtgcaggtacttaattctagaggtgcctgcttctcagaaagaagaaatatacagtactataggtgctggaacacatgtaagagttgtcagaatccaaccccagatcaacacaaactccacacaagggggtctacttcaaatcccattgaaacaaatgggaa

SEQ ID NO: 94188 - DNA, 600 bp, Chicken  19866894471935_1
gaagtaaatttctaaccacctgttctataaacaggcttagttaagaaacctcagccagtttgaaacgatgttcaataaaacggattacgtgttgggtgaagctataaaacagcgtgtagcatcgagcaataaaatctgcattactccataccagcaacaagttttaataattccatgcctcaggttttctgggaattacccacaagggctgagaagactgtttctttcctaatcttccccatcgtttacctgtttctttcccgttctctttctctttatggattcaaaacaaatgccagrtgtttttgtcctttcccccaacgcatttggggttggctacagaaaagaagcaatggaagaggggatggataatgccaggtttcaacagcatgaggtgtacagtttgtatgtcttgctcactgacataaaagaagcagaagatccacataaacctaaaatacatgaatactttttcagaaagattcaacaagcytatcatatcccttaacagaactaagcttctctaagtatgtatgtgtgtatatatacatacatatatacatatacacacacacataagtatatgtatatttctagatg

SEQ ID NO: 94189 - DNA, 469 bp, Chicken  19866894471935_2
aattacccacaagggctgagaagactgtttctttcctaatcttccccatcgtttacctgtttctttcccgttctctttctctttatggattcaaaacaaatgccagrtgtttttgtcctttcccccaacgcatttggggttggctacagaaaagaagcaatggaagaggggatggataatgccaggtttcaacagcatgaggtgtacagtttgtatgtcttgctcactgacataaaagaagcagaagatccacataaacctaaaatacatgaatactttttcagaaagattcaacaagcytatcatatcccttaacagaactaagcttctctaagtatgtatgtgtgtatatatacatacatatatacatatacacacacacataagtatatgtatatttctagatgcccatttttattcctttgactccagcttagactctagataaataccaaacatctatgagaag

SEQ ID NO: 94190 - DNA, 599 bp, Chicken  19866894471939_1
  misc_feature (1)..(107): n is any nucleotide
nnnnnnnnnnnnnnnnnnnnnnnnnnnnnnnnnnnnnnnnnnnnnnnnnnnnnnnnnnnnnnnnnnnnnnnnnnnnnnnnnnnnnnnnnnnnnnnnnnnnnnnnnnnctgtaactactagagcagaagcttatataaaattgtaaagtttatcttggcaatactttggtgagaatgaaattgtaaatgaagaaaaacatgaaaaatgaagcacctacttttaattttttaattgaccgaggtataatgcctgtcagttactagagcaggttgactgttgctagaaagaagtagctctttyaggaaaaaacaataataataaaaaaattaaatatatatatatatatacaactttgacataattactgactatgaaactaaaaagtataatctgtaatatatttaattttcatttgattgataatttacgtgagagcaaatatatgaaaagtgatggatgttcttactttatagtgccagccctatgtgacaygcacatctttttacattatatttaatgagaaaagcaaatgatagacaaatgaatcttgatgttactcttcaaccaaatccttaatgaggagcacttaacatttcttt

SEQ ID NO: 94191 - DNA, 600 bp, Chicken  19866894471939_2
aaaacatgaaaaatgaagcacctacttttaattttttaattgaccgaggtataatgcctgtcagttactagagcaggttgactgttgctagaaagaagtagctctttyaggaaaaaacaataataataaaaaaattaaatatatatatatatatacaactttgacataattactgactatgaaactaaaaagtataatctgtaatatatttaattttcatttgattgataatttacgtgagagcaaatatatgaaaagtgatggatgttcttactttatagtgccagccctatgtgacaygcacatctttttacattatatttaatgagaaaagcaaatgatagacaaatgaatcttgatgttactcttcaaccaaatccttaatgaggagcacttaacatttctttttacctttaaaggtaaagtagatcttgtctgtgtacttcatgctgacttcttaatagtattgataagggtattgatrggatggctgtatttttatttttatttttttttaggatggcagtttttcagtttgattggtttgctgttgtttctgtgaagcaaggtttcttatctcaaatgctgtcatgtagtctg

SEQ ID NO: 94192 - DNA, 520 bp, Chicken  19866894471939_3
ctaaaaagtataatctgtaatatatttaattttcatttgattgataatttacgtgagagcaaatatatgaaaagtgatggatgttcttactttatagtgccagccctatgtgacaygcacatctttttacattatatttaatgagaaaagcaaatgatagacaaatgaatcttgatgttactcttcaaccaaatccttaatgaggagcacttaacatttctttttacctttaaaggtaaagtagatcttgtctgtgtacttcatgctgacttcttaatagtattgataagggtattgatrggatggctgtatttttatttttatttttttttaggatggcagtttttcagtttgattggtttgctgttgtttctgtgaagcaaggtttcttatctcaaatgctgtcatgtagtctggctggttttgtccctctgtggtcaagttttctttcaaggagcatactgaataaaaagtaacaaggaatatgtttagaaactgaacagcttatggttagtcaaaa

SEQ ID NO: 94193 - DNA, 600 bp, Chicken  19866894471954_1
tttatttttatattttttaagagagagatgagatacagccataataaggtaaaattagctcaagtaggattgctaagccagcgctgagctggctggtttgctcatataaagcagcagagctctgcagagaggctacctacggtctcaaaagcagaatattgatgccagtaaatgttgtctcttggagataaactcgtgtggctgggttcaacagctgagctgtggcattgcagtggtacagcttgctgcctgcagtctcaaagctagctctgaggtaaggcagagagtgcgactacctcyagaattagatttgcccctgttaattttaatcaaaaagcagcaataattcacgtgtccacgcgtaattctggtaatgtggttaattttggtatatatttaacttgtgatagttcctaaaagccccatatacctccttggtttttgtgctctacaggaaacaggatatgctcaaaaaactttccagtcttaataagctgtcacctcacaattttctagttttcatgccttcacatttcaaattaaaacatcccagttatgcctaccataataaatgtatatcccgtggtacttttgtttatg

SEQ ID NO: 94194 - DNA, 600 bp, Chicken  19866894471956_1
aaattactaacaggagagttactcaggatagtaagattgtttttgttcaatccagcaactaatttaaaggaacataaaacttttcagtttgaaaaatgaaacaaaaataataaaagcttcagtacagcttttctttaaaatcctttggagaatgtgatatttacatgatggttattattaatgtaccaagaaaagtaatgttttcaagcatttcaatgtgtaaattttaagcttaatgtctacatttgaaatgattgttccttatgaaacaaatgttctccaaagtaactgtgagtattyataagtactgactgacaggatggctttctgttacttcttacagacttccctgtagtcttcaaaatttccctgaaaagaaggaacaaattattaagactttcatcagacatcaaacaaagtattccagaagaaccttgagaggctttttctaattgtaccaaaatttagcttgtgtcagttgttttgtctgtaatgtataggggcctgcacagattatcatagaacatataatttaataaagcttgataaatagcattcagtcattctctgtcaagggttaaatacaaggcactgtaattt

SEQ ID NO: 94195 - DNA, 590 bp, Chicken  19866894471959_1
atcaaatgcaaacatgtcatttcaaaagccaaagccacagtcaagtctgtggataccatgaggtgtatttttagccttgctttgtaccctttcttgtcacacttatgacttccctgaaatgcttaagcagagtacagtagccagcagatttctaaagccatagaggttcatggaaatttgtatttggctcccctaaaattggatggcactgactacagcagtgaaaagaaaaagacagaagtgctgcatgtgggaaagaaaaagataataggaatgaacaagcaaaataagtgataggawgaggaagaaaaagggttgggaatgagaggttgtggagaaacacctggaagtgactgagaagctcagaacagtgaaatgatggagatgaattacttgggagttaaacttattaatagaggacaaatgatgcggcagattcaaaaataacaatttgaactgctatttcccactatgttctgtgtacaaattgggacactaagagaagggaaggacctcttcaacccagaactgccaccaccatgaggaaaattttccttccaatgactcatgagaatattggtttcttcttg

SEQ ID NO: 94196 - DNA, 600 bp, Chicken  19866894471973_1
ctggcaagatactctcaccagtcctgatagtggagccctttaagctggtttacaagttcaagtctctctagtttctatagagcgctgattttggctgggtcttagatattctgtttctcccaggtcaactactatctgctctgcttgttggacagttgcaactctagctaccagagggttcaaaatagctactagggtgccatactgagatggtcttgctgcatgattggatgtcttatcccagatgagaatttaaatagttcaagacattcaaagtccttctcataaatggcccctttyattcctggtttccctatatatgtttgtgaatcttcctcatcatcccacattctactctgaatgggcacaccactttcatttggccatgtaaggttatataaagcaaatagccattgtaatagcaaactcttctcttcactctgtctaatggctgaatgtaatcttggtcacttggccaggtgaaacatgatagaagctagctttgacatctcagactctttaattgtaataccttctgcccccgtgttccgtagtcttaataaccatgcagggacactttctctcaatttttcatagaat

SEQ ID NO: 94197 - DNA, 600 bp, Chicken  19866894471974_1
gacaaaacaagtttggcaactattttatttaaaaaaaaaacccaaacgactttcttactaaggccattaatcattttttactgtaaggagacaaaatattcatttcactaacatttctgctgtttactacttacagttctttcagtttaggcagcattaaatagactgaagctgtctttttatttccttagtgatgtgggggaaaaaaataaaggacaatcatagtcatatagtcacccatagcatagtagagttgtctgccaccatctcttgggaaaagagaaaagggctcatcatttwaattatatgggcacgtctctccagtcacaaaaatttaatacaggttcacagtatatcactgctattctgcccatttccaaacaagcccaggagcattacaccagtgagcaaacccttaagataatctcttggactactacaaaaaatcaattcccaaattagagctcaagaatcacttgtgtgaatccagcgtttaattaagcataaatcttatctccactctgatgaaaacagagaagcgtagtgtgaaatgggaacaagtgatgtggaatttccttaatcctgatcatgacctcacat

SEQ ID NO: 94198 - DNA, 600 bp, Chicken  19866894471974_2
caattcccaaattagagctcaagaatcacttgtgtgaatccagcgtttaattaagcataaatcttatctccactctgatgaaaacagagaagcgtagtgtgaaatgggaacaagtgatgtggaatttccttaatcctgatcatgacctcacattttaaatttacatccagttctgctgaagtgatgtcagtctgccaacacagtggctgtaaaaacacatccagctaccactaacactcataggtgtgctactgagaacacctggaaaaaataacatgatgcaaggccaacttttctagsaataacaatacgaaactcaagcactatcaaacaggtactcaaagcatattgctaatgtaatttaaaatctacccctggctgcacaacttctgcagcactgttatatctactacgcaggtaacttggatggtaaggaataggggcctgagatacctcaagaggtgaggggggatacaaaggagcattatgatccactaaactagcggatcgtgactgacagtaacaacaaaatctttacctggtgttgtcatgatgagggttagaggaagtggtagcagctgacccaccacgtaacactgg

SEQ ID NO: 94199 - DNA, 599 bp, Chicken  19866894471975_1
  misc_feature (1)..(57): n is any nucleotide
nnnnnnnnnnnnnnnnnnnnnnnnnnnnnnnnnnnnnnnnnnnnnnnnnnnnnnnnncattgaggctccagcacgtgctgagcataagcattctgccagaggaggcagaaggagagcagcccagggagcaggaaagtcacacatgtaagcccagatcttgggaagtgcacctgcacacgagcatctctcagctgccaagtacctttctggctttctgaaccccttctggaaccttcccctctcacagcttgatgtgagcaggcgttaatagttcaagttcttcatcctacatccgtccawctctagtctgggaagaaacagcttctgatattaacagaacaagacttcaggagcgtccctaaccttgcaatacaaaccctcaacatccaacatcamggtctttaaaaaccacaagcctctcacgccaggattcaccatcccagcacagcttttgaaacgttcattctgtattatcaccttcttacacaagcaggcccacacatttaagcccttgccaacaatgcgctctgttacaaggagaaacagatggcatgaaggcacgcttttgcaaccctgtttattgaatgytcccaaggttg

SEQ ID NO: 94200 - DNA, 600 bp, Chicken  19866894471975_2
cagaggaggcagaaggagagcagcccagggagcaggaaagtcacacatgtaagcccagatcttgggaagtgcacctgcacacgagcatctctcagctgccaagtacctttctggctttctgaaccccttctggaaccttcccctctcacagcttgatgtgagcaggcgttaatagttcaagttcttcatcctacatccgtccawctctagtctgggaagaaacagcttctgatattaacagaacaagacttcaggagcgtccctaaccttgcaatacaaaccctcaacatccaacatcamggtctttaaaaaccacaagcctctcacgccaggattcaccatcccagcacagcttttgaaacgttcattctgtattatcaccttcttacacaagcaggcccacacatttaagcccttgccaacaatgcgctctgttacaaggagaaacagatggcatgaaggcacgcttttgcaaccctgtttattgaatgytcccaaggttgtgctatcagcagacacctcgctcaatgccaagtccctttttcagaaggtaccaactgaaggcttctcagacctgcctccaagcacgctgtatttctg

SEQ ID NO: 94201 - DNA, 600 bp, Chicken  19866894471975_3
acatccgtccawctctagtctgggaagaaacagcttctgatattaacagaacaagacttcaggagcgtccctaaccttgcaatacaaaccctcaacatccaacatcamggtctttaaaaaccacaagcctctcacgccaggattcaccatcccagcacagcttttgaaacgttcattctgtattatcaccttcttacacaagcaggcccacacatttaagcccttgccaacaatgcgctctgttacaaggagaaacagatggcatgaaggcacgcttttgcaaccctgtttattgaatgytcccaaggttgtgctatcagcagacacctcgctcaatgccaagtccctttttcagaaggtaccaactgaaggcttctcagacctgcctccaagcacgctgtatttctgtggctgtcactgcattttcctcccaagttcctactttttaaataaaacacatgaaattagattgtgtgctagctactttggaagatatttgaaaggaattcaataaaggagttgaagcactgcacatatgtgagagcattaagccacgcatcggttcaccttacttgatctcttccacacagaacaattcca

SEQ ID NO: 94202 - DNA, 570 bp, Chicken  19866894471976_1
gtgtctcttcaggtcacatctcctccaggacactgcctttggtttagttcattctctcctgagataaacctgcttgctggaaatctatgattaaactctgatctttaggctgatctgaaaacagctgcccgttgtccaggcacaaaccagtgcaaacctgagggctagaggcaaacacgtctccactgctgattttttctctggatctactaacatttagctgcccagtctgatgcaatgtagaaacatctcaatttagcagttccccagccttacacaggctggctgatttgctgagamtttccttctgcctcatcccctgtagtggcatgtcctcgtgcttcsttctctctacyattagtgtggcagacaggatggggctacaagcagcagaggatgatgtggcatcggctgcaacgtgtggctctaggaattcctgcagtgcggctttcacagccctgcacagagctgcctctcttctgggcagcggtgctgctatcgaactgtgcgtgagcacattccttctgatctgtgtgttcacagtgtgttcaggcttgctgacgaattgca

SEQ ID NO: 94203 - DNA, 525 bp, Chicken  19866894471976_2
agttcattctctcctgagataaacctgcttgctggaaatctatgattaaactctgatctttaggctgatctgaaaacagctgcccgttgtccaggcacaaaccagtgcaaacctgagggctagaggcaaacacgtctccactgctgattttttctctggatctactaacatttagctgcccagtctgatgcaatgtagaaacatctcaatttagcagttccccagccttacacaggctggctgatttgctgagamtttccttctgcctcatcccctgtagtggcatgtcctcgtgcttcsttctctctacyattagtgtggcagacaggatggggctacaagcagcagaggatgatgtggcatcggctgcaacgtgtggctctaggaattcctgcagtgcggctttcacagccctgcacagagctgcctctcttctgggcagcggtgctgctatcgaactgtgcgtgagcacattccttctgatctgtgtgttcacagtgtgttcaggcttgctgacgaattgca

SEQ ID NO: 94204 - DNA, 514 bp, Chicken  19866894471976_3
tcctgagataaacctgcttgctggaaatctatgattaaactctgatctttaggctgatctgaaaacagctgcccgttgtccaggcacaaaccagtgcaaacctgagggctagaggcaaacacgtctccactgctgattttttctctggatctactaacatttagctgcccagtctgatgcaatgtagaaacatctcaatttagcagttccccagccttacacaggctggctgatttgctgagamtttccttctgcctcatcccctgtagtggcatgtcctcgtgcttcsttctctctacyattagtgtggcagacaggatggggctacaagcagcagaggatgatgtggcatcggctgcaacgtgtggctctaggaattcctgcagtgcggctttcacagccctgcacagagctgcctctcttctgggcagcggtgctgctatcgaactgtgcgtgagcacattccttctgatctgtgtgttcacagtgtgttcaggcttgctgacgaattgca

SEQ ID NO: 94205 - DNA, 599 bp, Chicken  19866894471981_1
  misc_feature (1)..(159): n is any nucleotide
nnnnnnnnnnnnnnnnnnnnnnnnnnnnnnnnnnnnnnnnnnnnnnnnnnnnnnnnnnnnnnnnnnnnnnnnnnnnnnnnnnnnnnnnnnnnnnnnnnnnnnnnnnnnnnnnnnnnnnnnnnnnnnnnnnnnnnnnnnnnnnnnnnnnnnnnnnnnnnnacttttgataatctgggaaattctgtgaaagtatcagcacattcctattacaattgtggtatctcaccaacacataattgcacatgacaaaatgactgagcacaaatttaagaggaatcactgttttgtttcttaaacackttttgctttcattcatttctctctcacctctacgtgcaaaatctgattgaaagtaattcccagtgtccatcatttctactgagacacaatcacattattcttgtgtaacggaacctaaggaaaaaactccacctcctgcaccttctcctcaatggtcaggacaatgatgtaaattttacttctatttaacaaagttaatgatagcttgtggggagatttccagtgttacacttcagaatatatcttgctcatgcacacatgcaaagcttaagaagaaagcagcagaacagactcagtac

SEQ ID NO: 94206 - DNA, 600 bp, Chicken  19866894471984_1
ggagccaaatgacttgggtttcactaaagcaaagcttctaaaaaggtgctctgtctgaatggaagactaacgatgaggcatccaatgtttacataggtatttgttctaatgattagtcaaccttgttaaatagtaatgctatttctacctgcatttgtctggcttcagctcccagtcataaatgccttggtatacacatcctcatggcactaaagagcctgttaacacccaggacccctcaaagacactgagacaatagatatctgtcagcctttctgccaccctcatgtttaacatgtyttttttttatataattaattttaggtctctcagaaaaagcactgaagtgtaccaggctcagctgagactttgaagaaaccacctaaagcccttcagcacactccccactgatgtctgtgtgttgtttttttctttacacatctcagacgtacagctttatatgatcatacaatgctggagatctttttaaacagttatttgctacacaaccatgtgtctcatttaaaaaaaaaaaaacctaaggaaatgacatctatctgatcatttttaaacaagtaaatagttattttttccctcaaa

SEQ ID NO: 94207 - DNA, 600 bp, Chicken  19866894471987_1
gacaaggcaattaaacaaacatttagcaataaaactatcactagagatgcccaacaagcaaagcagaacaagtagatgagcccagcaggcagcacaggtgttgtatcagtgcaaagccccatagcacccacacagcaaggcaaatgtgtaacaactgcacacgaggctggtgctgcacagaactgggcatacccacagcctaccctttgtatccttcatctgaattctgtgcaacattttatacaaaagttaggtcaggagcagtaattttctctggtgcaacacttgccagaagagacrgccacttcctgcaacatatggttagagaaacctcgttcccaggtgaagagaaacccagcccgggtgaagcagactaaagcatgaggaagggcagcattcccacagtatttctcttctcccatccagcagcccgagcaggctgccatgcagcacaagtctgtgcttgtatggggtgctctgcagtccctttgcaatccacctgcttggattgcagtgctgtacctctgccagctgctctccatggagaggagagcatgcatttgagatgccttctccaatgtgtcttagagatggaaacag

SEQ ID NO: 94208 - DNA, 600 bp, Chicken  19866894471997_1
ttacagacctcaatcatagtattcccattgtgaaatgatcttcatttttgatagcatccttttctctagaccaaatagccccagttccttcagtcagacctcatatatcctgcgttctcatcccttcaccagctttgttgtttttctctaaatatgttccagcaattcagtgtcttttttgtagtgagtggcccaaaaccaagcatagtactaagcaccaaaacttgtgtggactcaccattttgattcacaaagcaataatcactttccttgtcctgctgctgacactatttctgatgyagaccaatatgctgttggccttcttggccacctgggcacacttctggctcatgttcagccagctgtcaaccatcgcttccagttccttttctaccatgcagcttccttgccactcttccccccagcttttacctctgcatgaagttactatggcacaagtgcagcacctaccactcattgaatgccatacatttggatgcaacccatcaatccagactatccagatcctgctgcaaagccttcctcccctcaaatagattatcactcccaacaacttggtgttgtttgcaagcttactaa

SEQ ID NO: 94209 - DNA, 599 bp, Chicken  19866894472000_1
  misc_feature (1)..(105): n is any nucleotide
nnnnnnnnnnnnnnnnnnnnnnnnnnnnnnnnnnnnnnnnnnnnnnnnnnnnnnnnnnnnnnnnnnnnnnnnnnnnnnnnnnnnnnnnnnnnnnnnnnnnnnnnncaattactaatcttattatttagtgttatcagaactaagatgttcagccccatgctgggactgtattgttgcatgcatcacatagaagacaatgccagaccccaccacctccgccttggaggccttccctgcttctgagtgcagctgagatttctgtcagtctgttgcttgtttgcaaattgaataggctgaagwtggatttcatgctttcagtccatgctgaaggaatgcataaccatgcagaataatgttatgctttaacattctcacgtctttaagataatcttatctttttgaattatgtgaaactggcagtgatcttttactttgcaaatgtgtttaacgacttgttgcatgaatcatcataaagtagttccatcaactctatggctggtattgatcgtacaacctgaatgaagagtgagatgtgacgctttgcctcagctttagttaaagcaaacctttagaagtgagaatagaaaggctacagttgt

SEQ ID NO: 94210 - DNA, 600 bp, Chicken  19866894472003_1
aagtttcttcaagtaagaagtgattgattctaggccataaggtttgagaagacctctgttatcattgagtccaaccactgatccatggccaccatgcccaataaaccatatccccaagtgtcacacctccatggatggtgacaccaccccttcccagcctggtccagtgctttgctgctctttcagagaagaatgattaaacgccatctgaaatgcaagcagtgcatgcctcggttcatcgcctctgcttggctcatccacaggctcagcttggccacgaaaaatggggacagatatccygcacatgctgtctgcttgagatttatgccagtgagtgcctggtaaaaaataaaaggcatctagagtcccgggagagctcacagaacagtcaagcatgtgtgctgctgcacatacaggggggaatctaggagttaaaataccctgcaaccactcctttcccttctctccccattcccaagggagaaaagccactgagtgttaaaacagcaatactcaaacatcacatttcccacacataaaggtgtgtttcgaacaaagggcttgtgaaaggaaaaatatgtaaagctagacaccacagga

SEQ ID NO: 94211 - DNA, 599 bp, Chicken  19866894472006_1
  misc_feature (1)..(38): n is any nucleotide
nnnnnnnnnnnnnnnnnnnnnnnnnnnnnnnnnnnnnnactcacatgccacatctgtcacattgccacatctttcagaccagtgttatattctgatgatctgaactacagctattacctcaaatatttgctaacaattcacggaatcacagagtcttaggatctggaagggacctctggagatcatcaagtccagccccctgctaaagcaggctctctataacagattgcccaggagagcatccaagtgggttttgagtatctccagagaagaaggctccacaactttcctcaacagccygttccagtgctctgtaaacctcaaagtaaaaatgttcttctcatgtttgtatgaaacttcctgtgttgcagttggtgccaacggacacttgtcctgtcaccgggcactgctaaaaagagcctgttcccattcatttgacttctacccgttagatacctataagcatttacaagatcccctcttggtcttctgttctccaggagattcaaacagaataattatggaatttctctgtacatcatgttattattgcagtttcagtttcattttcccgataagtgattaaatcaacacactgc

SEQ ID NO: 94212 - DNA, 599 bp, Chicken  19866894472014_1
  misc_feature (1)..(69): n is any nucleotide
nnnnnnnnnnnnnnnnnnnnnnnnnnnnnnnnnnnnnnnnnnnnnnnnnnnnnnnnnnnnnnnnnnnnnttttaaattgctctctcaaggagttattaatatttctagcattcttttgaagcataaaaggcagccctgttctcagacaaggaagctgcagggaactgtaagatagggtcagcctggacagacactcagtatttttctaaacgtagcttaaaccagaacaaaatacaaacttgtatgattttgttaaacgtgcctaaatcaaatttgtctcctgtattaaaaggtggaaayattatgttaatacactattacgtttgctaatgtaagaccataaaaagcagcagatagaaatgctaaggtagytgtgataatatcggtgtgcttaaaacactagacagattcttcgtgcagtgcatagatgacactgcagttttgggggatttggataagagtagttttgattaaattaaaaaattaaataaagcaggtgctggaccacactggtacaagctctccaaagagtcctttgtcacacccagtgtgaatagtgaggataagcacactgcatctttccttggggtcctcacatg

SEQ ID NO: 94213 - DNA, 599 bp, Chicken  19866894472014_2
  misc_feature (1)..(68): n is any nucleotide
nnnnnnnnnnnnnnnnnnnnnnnnnnnnnnnnnnnnnnnnnnnnnnnnnnnnnnnnnnnnnnnnnnnnttttaaattgctctctcaaggagttattaatatttctagcattcttttgaagcataaaaggcagccctgttctcagacaaggaagctgcagggaactgtaagatagggtcagcctggacagacactcagtatttttctaaacgtagcttaaaccagaacaaaatacaaacttgtatgattttgttaaacgtgcctaaatcaaatttgtctcctgtattaaaaggtggaaatyttatgttaatacactattacgtttgctaatgtaagaccataaaaagcagcagatagaaatgctaaggtagytgtgataatatcggtgtgcttaaaacactagacagattcttcgtgcagtgcatagatgacactgcagttttgggggatttggataagagtagttttgattaaattaaaaaattaaataaagcaggtgctggaccacactggtacaagctctccaaagagtcctttgtcacacccagtgtgaatagtgaggataagcacactgcatctttccttggggtcctcacatgc

SEQ ID NO: 94214 - DNA, 599 bp, Chicken  19866894472014_3
  misc_feature (1)..(67): n is any nucleotide
nnnnnnnnnnnnnnnnnnnnnnnnnnnnnnnnnnnnnnnnnnnnnnnnnnnnnnnnnnnnnnnnnnnttttaaattgctctctcaaggagttattaatatttctagcattcttttgaagcataaaaggcagccctgttctcagacaaggaagctgcagggaactgtaagatagggtcagcctggacagacactcagtatttttctaaacgtagcttaaaccagaacaaaatacaaacttgtatgattttgttaaacgtgcctaaatcaaatttgtctcctgtattaaaaggtggaaataytatgttaatacactattacgtttgctaatgtaagaccataaaaagcagcagatagaaatgctaaggtagytgtgataatatcggtgtgcttaaaacactagacagattcttcgtgcagtgcatagatgacactgcagttttgggggatttggataagagtagttttgattaaattaaaaaattaaataaagcaggtgctggaccacactggtacaagctctccaaagagtcctttgtcacacccagtgtgaatagtgaggataagcacactgcatctttccttggggtcctcacatgct

SEQ ID NO: 94215 - DNA, 600 bp, Chicken  19866894472014_4
taaattgctctctcaaggagttattaatatttctagcattcttttgaagcataaaaggcagccctgttctcagacaaggaagctgcagggaactgtaagatagggtcagcctggacagacactcagtatttttctaaacgtagcttaaaccagaacaaaatacaaacttgtatgattttgttaaacgtgcctaaatcaaatttgtctcctgtattaaaaggtggaaatattatgttaatacactattacgtttgctaatgtaagaccataaaaagcagcagatagaaatgctaaggtagytgtgataatatcggtgtgcttaaaacactagacagattcttcgtgcagtgcatagatgacactgcagttttgggggatttggataagagtagttttgattaaattaaaaaattaaataaagcaggtgctggaccacactggtacaagctctccaaagagtcctttgtcacacccagtgtgaatagtgaggataagcacactgcatctttccttggggtcctcacatgctcttacacatatattcaggctgctgctgcacatcaggaagaggagggatagctaatttctctgctactgcta

SEQ ID NO: 94216 - DNA, 600 bp, Chicken  19866894472029_1
gctgcttagcagagcagcaataacccacacagaaaacacacccgcacccgaaagttgggcaagcagtgaaggacagagcaacaaacgctgctcccgtccatctttgctatattcctgtcctttccaccagagccaactagaacttcctagaaatactagtgattcttttctctgggtccaaaaatagcagcttagtaaaaattcccagccactattgctgtgctctgtaccaacgcattgtttctatatccctccaggagaggaaatctgatcatttctgtctagcttgcttctgagctwgcaggtttggagctgctaattgcagtaatggtaccaagaaaattctgtaagagaaatcaactgcttgtagaactcatactagtaggaaaatacacttgggagaggtaggagagatgatcatttagcaacgtaacttggccctgtgaaatcagctttctcccaactgaaaaaaaaatatggctataaagaagcagagcacttcaaaccttggcacatgcaacttggatgtaagaagcatctgcaattttgtcatcaagaaaccagactatgcaatattccagactaaaatccacattgaaa

SEQ ID NO: 94217 - DNA, 600 bp, Chicken  19866894472030_1
taatgcaatgttacttattgactgaacatcttgttcttattttgttgtggagaacagataatgtttgcccaggctgatctgcttctggtaaaatgacagggtttgtggatgaggggagagcagtggatatcctttttgcgtaacttcagtaatgttttcagtattgtctctcacaacatggtctgtatccaggttaagggggttcagctatggatggttgaaaaactgattaggttcagagatcatactttgcctggaggctgatagtggaatatcccagggttttatcatcatctcctycagatcatttacgaaggagtgcaacttgcatcacatttccagattacagaaaaccttgaggaaccagctgttgccatccagatcaggggtaccatccagaaggaactaaactagctggtggaatggcccaaccaaattagaacaaggacaaatataatctgaagtgctgcacctgggaaggatgaaccctgagctggggaatgacagtctggggagcagcttccttggaaagaaaggaactagtagacataaagatggaaacaagccagctgaccatgggccctggcagcagagggcgcc

SEQ ID NO: 94218 - DNA, 600 bp, Chicken  19866894472045_1
tagaagtacgttatctggttatgatctgtcctaggtttctctaaaattactatgggaagcgagcttgcttctaaagatgtttattcaccaacatgaaaatgtattgcgtaaatccagctgtcattatttacagatatggagatgaagaatagagtgggggaaggggaaagagtcatggtgaactctttggaagtgtttcagttggggggtctgtgactgtgggtgtttctgaagctttagaggaaacacagaggaggcattggtgccttaaaggattttttgaaatttttgttgttgttktttgttttttacaaatcaattgagatgcagtgcattaamttttggaggttagtggcaaaggaggaaggaagacaaactcaacagtatgggatgagtttgtagaaaaaattgaaactagaattaaaagaaaggaacaattagctagtagcttgatgaaagtaagtgtaaagtattaaagcaattggtgaataaaaatgatgggagagatgcaggcactacacgagctgaatagcagcaaaattgttcaaactcttcagaggaagcaaaagatgcttacatgtggaatggagtgtaaagaga

SEQ ID NO: 94219 - DNA, 600 bp, Chicken  19866894472045_2
tctaaaattactatgggaagcgagcttgcttctaaagatgtttattcaccaacatgaaaatgtattgcgtaaatccagctgtcattatttacagatatggagatgaagaatagagtgggggaaggggaaagagtcatggtgaactctttggaagtgtttcagttggggggtctgtgactgtgggtgtttctgaagctttagaggaaacacagaggaggcattggtgccttaaaggattttttgaaatttttgttgttgttktttgttttttacaaatcaattgagatgcagtgcattaamttttggaggttagtggcaaaggaggaaggaagacaaactcaacagtatgggatgagtttgtagaaaaaattgaaactagaattaaaagaaaggaacaattagctagtagcttgatgaaagtaagtgtaaagtattaaagcaattggtgaataaaaatgatgggagagatgcaggcactacacgagctgaatagcagcaaaattgttcaaactcttcagaggaagcaaaagatgcttacatgtggaatggagtgtaaagagaagccagtgacatttttaaagcttatctagccacctctat

SEQ ID NO: 94220 - DNA, 600 bp, Chicken  19866894472047_1
ttctgtggacaaatacaccgattttattgcaattactttttgcaggtctttagtttagttttagtttttttagtttgaggacccagtaataatccttctatgctcagcatcatggctgtatcatttgcagtgcagtaaaatgtaggcagattccttaaatccaccttcttacaaaatagtcatgaatgaaaagactgctttctaatttattattcagtaacagacggggaaaaatacctggttaataaacatcactgctgtatgtttaaggacaaggctgtcatttggttgtgctaaccygacaggggcatttagatttcttttcataggaaatcaaggataaattgacttcatgagtatttgctgttggtcttctttaagagtgtatataattcatgctgctgcacaagtactctatgttggctaattaattagggtcaaacctatgacaggttcacactgttgacctttgacataaacctgaaggattaagaaagatgatcacctgttttaattattttctgaattcagtttaaaaaaaatgcaactatggacagtgtactttacagagaacatgatacttgagtgttttgttctttc

SEQ ID NO: 94221 - DNA, 600 bp, Chicken  19866894472054_1
cacatgaggctccatcactatgtatagaagttccctggggttctcactccttttcatacaggatcagctgataaagacaccaaagtcaaaggtattttgctgagagcaatgtatttggctccctcctgtggacacagcattgctaatcttcccaaacttctgattgaaacaagagaacaataccagctcatgctgcagcccatccttcccctggctgagccctgtgctgcgttggccaacagagatttttccaagcttaagcactaccagcaatgtcacagatacatgaaaatgacacayagcagttttaaaacacgagaactgttgcaggaatgaaccaaagagtgtttgaagcacataagagacagctcgatgctacactgcctgggtaaatgcaggttaactgcctactggctttgaattttactgtgtagccctctattgcctctcagtgtgagttcagctcagtaccttccaggcttatttcccatccaggatccaactacagaatgcagtaaactcaagctctgtttgttagctgttcttactaattacttataaaaacagcagctgggaaagggagctcctctccacagagct

SEQ ID NO: 94222 - DNA, 600 bp, Chicken  19866894472055_1
tttctgacctccttatctccccagtatccttcacaatttattcatttattttatttattatgtagtttactttgaggtgtactttaccaacctatatcacttaagttgtgtgtaagtgaaaaagagataaaaattctttcaggaaggtttcactttcaagtgcagttatatttatgtagttaataaataaatgggataggtaatttaattttatttccaattctagtattctcttaagcattgtaagcttattttcaggtattctttatttctgagtttccattggagaattacacagtycagaggtaactctaggaaacacacctgttcaaaactttattctaaaattaaatgttaatgatttttcaccaagatgtgaaatgatttaatgtgattcaatttcacttactatacttattttcatatgttcccattgtttacctaataaaactatgttagtttatcccaaaaatcagtctttgcattctcaaaacaagataatccttccagttgctctcctgacatgccattatgtaagcagtttaagcgtgctgccatgtagaacactgatattttgtgtggcaagaggtttgakctgtt

SEQ ID NO: 94223 - DNA, 600 bp, Chicken  19866894472055_2
cagtycagaggtaactctaggaaacacacctgttcaaaactttattctaaaattaaatgttaatgatttttcaccaagatgtgaaatgatttaatgtgattcaatttcacttactatacttattttcatatgttcccattgtttacctaataaaactatgttagtttatcccaaaaatcagtctttgcattctcaaaacaagataatccttccagttgctctcctgacatgccattatgtaagcagtttaagcgtgctgccatgtagaacactgatattttgtgtggcaagaggtttgakctgttggccaaagaaagagggaaagattcagggtctaccttatatacagtattcttgcaagctattgcagctaccttactatacttatcccctgccctcccaaatcctgaaaagatgtacagaaatagaaagaaatattaaatcttgaaagattgggcccaattcctggacatattcgtaacactttgttaaaatttgtcttattttttgaacataatagtagaatagtgtaccattaatgtttaaatggacaaacatctttcagagacccaataacatttctctaccaggttgacaggg

SEQ ID NO: 94224 - DNA, 599 bp, Chicken  19866894472056_1
  misc_feature (1)..(43): n is any nucleotide
nnnnnnnnnnnnnnnnnnnnnnnnnnnnnnnnnnnnnnnnnnnctcaggggaggtcagtgtgtggtttgaataccagcaaatagcaaatttcatcttaaaactgtgctctcatactgtgaggacaggaacagactcctcattggtaggttattgttggaatacctcctttgtgatgctataaggcaagcttatttggatggaagttgtgtggagaagtcactattacaacagggactagtttctgtacagcagggagtagtatgggtagggactgctaagggggcaagaggaaaggagakttttttccccaaaatagaaaccattctgaatttagcttctgggctgtagcaggcagcaggacttcagaatttgggctattgctttttaatttctacatgtattttcaagtatgacagcaattacagctaaaactatgtgagctgctttctctatggggaagagggcctttcctcagctatgtcttcaagcataaaagcattatagaagtgccttactgtgtcaaacatatggcccatctggactcgtgtatctacccttggtggtaacagcaagcaatattgtgtaaggctaggacatg

SEQ ID NO: 94225 - DNA, 600 bp, Chicken  19866894472066_1
ttacgcctgataggcagtttgaggtctccaacctaagtctgggaaaaggtaacaattatttttctagcgtttctcatgtcattggagtgaacatatggcaaattaattatattttgtcatccatacatacttacattcgacaggttcaaacccttataatgcttgtcattttacaggggctaagcacttactgagaggtaagaagactgccattttaagtgacttgagtattgcttataaaatctcttaaatctctgtattttcagcctgttcattcctccagtatgttggagtggaggyagagggaggcagtaacttccagatttggcccaaggaaataatctctggattaagtgtcttctcttacttttctttctaggttatgtgtcactgtaaatcttgtttgcatagcatcctaaatcttttcatgtctacttcagcatcagttatcagaaatctctgttctcagtaattgccatcctaaacaggtttattacagtgaatgttttatctggtatgatttaaatggaaatttaagagttctttttgtgatcaaattagaaaaatagattaaaaaaatagcaggggtttcacatgctc

SEQ ID NO: 94226 - DNA, 599 bp, Chicken  19866894472077_1
  misc_feature (1)..(9): n is any nucleotide
nnnnnnnnntcagaggcaatgtgatcagatgggaagttctgtatgaaacgtgctaaaataatataaaataaccaaaaaccatgaataaaaatggaaaaaattggaagcattttgagctctttgggttggactgtgcatggatatctctgggcacggatacacggatggggctttgctacagagaaggttctttgagggaggatttgagtgcagcatttctccctttgtgcctttttggggtcagaaggaatccttatcgtgatgacaatgtggttgcttttcttccagattttggatgayggaggagatctcactcattggatctacaagaaatatcccaacatgttcaagaagatcaaggggatcgtagargagagtgtcactggagtgcacaggtaatgggaagtggcagagaagggctgagggcgctgcacaagggacagcctttggagaaagccaaaggcttggacctaagctcggtctctggaaaggagtgagacgtggcagaggaaatwatgaytgttttggggtgggattgcagaaagggagagctgcagaggtgttgcctcatcacagagtgatcctgaaatcagggcayt

SEQ ID NO: 94227 - DNA, 600 bp, Chicken  19866894472077_2
caaaaaccatgaataaaaatggaaaaaattggaagcattttgagctctttgggttggactgtgcatggatatctctgggcacggatacacggatggggctttgctacagagaaggttctttgagggaggatttgagtgcagcatttctccctttgtgcctttttggggtcagaaggaatccttatcgtgatgacaatgtggttgcttttcttccagattttggatgayggaggagatctcactcattggatctacaagaaatatcccaacatgttcaagaagatcaaggggatcgtagargagagtgtcactggagtgcacaggtaatgggaagtggcagagaagggctgagggcgctgcacaagggacagcctttggagaaagccaaaggcttggacctaagctcggtctctggaaaggagtgagacgtggcagaggaaatwatgaytgttttggggtgggattgcagaaagggagagctgcagaggtgttgcctcatcacagagtgatcctgaaatcagggcaytgctcagctcctcaagagtttatatttgtccctccagatgagctcggctcatcctagcaaagcagaacactgga

SEQ ID NO: 94228 - DNA, 505 bp, Chicken  19866894472077_3
tttctccctttgtgcctttttggggtcagaaggaatccttatcgtgatgacaatgtggttgcttttcttccagattttggatgayggaggagatctcactcattggatctacaagaaatatcccaacatgttcaagaagatcaaggggatcgtagargagagtgtcactggagtgcacaggtaatgggaagtggcagagaagggctgagggcgctgcacaagggacagcctttggagaaagccaaaggcttggacctaagctcggtctctggaaaggagtgagacgtggcagaggaaatwatgaytgttttggggtgggattgcagaaagggagagctgcagaggtgttgcctcatcacagagtgatcctgaaatcagggcaytgctcagctcctcaagagtttatatttgtccctccagatgagctcggctcatcctagcaaagcagaacactggagaacacgcaacagtaaaccaaaaggacatgttttccacttatcctctg

SEQ ID NO: 94229 - DNA, 500 bp, Chicken  19866894472077_4
ccctttgtgcctttttggggtcagaaggaatccttatcgtgatgacaatgtggttgcttttcttccagattttggatgayggaggagatctcactcattggatctacaagaaatatcccaacatgttcaagaagatcaaggggatcgtagargagagtgtcactggagtgcacaggtaatgggaagtggcagagaagggctgagggcgctgcacaagggacagcctttggagaaagccaaaggcttggacctaagctcggtctctggaaaggagtgagacgtggcagaggaaatwatgaytgttttggggtgggattgcagaaagggagagctgcagaggtgttgcctcatcacagagtgatcctgaaatcagggcaytgctcagctcctcaagagtttatatttgtccctccagatgagctcggctcatcctagcaaagcagaacactggagaacacgcaacagtaaaccaaaaggacatgttttccacttatcctctg

SEQ ID NO: 94230 - DNA, 422 bp, Chicken  19866894472077_5
ayggaggagatctcactcattggatctacaagaaatatcccaacatgttcaagaagatcaaggggatcgtagargagagtgtcactggagtgcacaggtaatgggaagtggcagagaagggctgagggcgctgcacaagggacagcctttggagaaagccaaaggcttggacctaagctcggtctctggaaaggagtgagacgtggcagaggaaatwatgaytgttttggggtgggattgcagaaagggagagctgcagaggtgttgcctcatcacagagtgatcctgaaatcagggcaytgctcagctcctcaagagtttatatttgtccctccagatgagctcggctcatcctagcaaagcagaacactggagaacacgcaacagtaaaccaaaaggacatgttttccacttatcctctg

SEQ ID NO: 94231 - DNA, 600 bp, Chicken  19866894472082_1
gcccctggcctgttgtctctgcatggaacccacctatctcaaagcggacaatgaatcctagggcaggagttagcggggcttatcaaaagagctttaaactagctatgacaggggaagggaaaaaaacagggttaaccagagatgagcctgggggaacaatgcctgagatggggatgaggcagatgacttggctcaagtgcatctacaccaatgcacgcagcatgggcgacaagcaggaggagttggaagcgattgtgcagcaggctaactatgacctagttgctattactgaaaaatggwgggaccactcccatgactggagtgctgtgttggatggctataagctcttcagaagggatagacgaggaaggaagggtggtggtatggccctttatattgaagagtgttttgatgttgaagagcttggggttgggaatgatgaagttgagtgtctacaggtaaggatcaggggggaggcctgtaggggtgacatcttggtgggagtctgctacagactacctaatcaggatgaagagatggatgaggcattctatgagcagcttgtgaagtcatgcaatcgcctgcactcattctcttggg

SEQ ID NO: 94232 - DNA, 600 bp, Chicken  19866894472086_1
gtactgaagagagtggaaatccctgaaagtagtgaaatgatgtgaaataagcacagacagcagagacaacttctgatcaagaagtgattctgtttatgaatcaacaggaactgaagacagaacagtattatggtacctcagaatttttacgatgcatttaaacacagtacaaaattaaattaatgaaatactttctatggttaaaacactttctcctctcctcccataggcaggaaaattttctttttaatataatacagttttcttgagaaggaatactcaaaacaaatcatttatgtytctccctttaaatacctgagcagcttttaatacacttttagtacaaatctaccactttccattttgtcaaacttttctattgctcatattatcattattagctacattaaataactttcctttgaagaaaatttagaaacctaagagaagtctagaagattaagataccttaaaaattcagatttttttttaaccaaaattcacatgacgctatgagcaatgaataccattaccaaaacattaattttctcacaggtaaggaactaaaaataacaggcaattcagtagttagatatactt

SEQ ID NO: 94233 - DNA, 600 bp, Chicken  19866894472086_2
ttaggataattttaatgtcgtctttatttcacttttgacagcagctgttaaccacagccagagaaatctaactttaattaggctcattcaacttcagatggttcggcaccttttaaaaggcagctgaagaaaatttttatttaaaatgagttgattttaccccagcagagagtgaagggaacacaacacttctcaactataacactcttatcagctaaatgcacagcactattactagtatactttcttaatgatactaaaaaggatattatattacacttcattcacagtattcagcaygtgcagttcatgaggacagagtggttaagcaaatggattttcaagaactcaatttttgctttaatggagattatgacgttgactggagttttctctatttgttcactacaatgagacttcaaacactttgcttacaaagataaatagaaataatacaaaactactatcaaaaaatatagatcacatgaaaaatatcagaaaacagtaaaaataattctacacttggtaagagtagcaaaagaaggaaggcaaagctttgactgtttctgaaagcacagacctctattcgttttgcccaga

SEQ ID NO: 94234 - DNA, 600 bp, Chicken  19866894472090_1
ttttgatagtgtattgaaaagttgagagcagaatgcaattttgtaatttaacgtattgttcagtaggtgtgaaagatgcaaaatgcagaaaactgtctggtaaataacatctttaattgctgaagtataaaatattcaaaattcaattttttatgcctactgtattatagatgatgccctgtatttttcagggtttattttcaatttctgtataatttcacagaaatacagttgtgaaggtctaccttcctatacttattatactagcaagatatatatttttaataaagtgtcccaaakattataagtaaaatctacttacattttcatataggtaatttaacttacttgcatgttagtctcatcttgttgacctctgatttaattatgtttcatttcatctccctgatgaagctgcctttttacaacgtattttagtttaaaaataaatactgaagaataaaatagtaagattgcactcaccagtgctggctcctgcactctggccacaataaccccatgcagagctataggcttggagctgagtggctggatgactgtgaagaggaaagggacctgggggtgttggttgatgctcag

SEQ ID NO: 94235 - DNA, 590 bp, Chicken  19866894472096_1
ccttctctttctcttggtggtatcatggtaccaactacggttgcaatgcctgtgactctaaaactaacacagtataatacctccattttcccctactctggctccctactgaaaaagaaatatctgccttaaaaggtttgacattatcttccaaatcctttgctgactttaaaaacctattctctcataatgaaaagaagctgtatgaccttatggataacatcttcaccctttctcttcatctatttactgttctgcctatgagccagggtttttccagggtatgaaccctgggagcayatttgcagcaacagggatggaatgaaggttccctaacattcaatcacttaaaatgtcagctagatactcatatgacacatatgcactccaaagcattaacagcatgttctgagcaccaaaaatattgatggcacttcagatgtgttgtgttattttcatattaaaggtttagtcatgatgttttaaatttttatttaatatttttgttctgttttgttttgttcgtttgttttgcttctactgcaaacattctttccaatattaaggaagtaaatgaaatatgcaagcaa

SEQ ID NO: 94236 - DNA, 599 bp, Chicken  19866894472102_1
  misc_feature (1)..(121): n is any nucleotide
nnnnnnnnnnnnnnnnnnnnnnnnnnnnnnnnnnnnnnnnnnnnnnnnnnnnnnnnnnnnnnnnnnnnnnnnnnnnnnnnnnnnnnnnnnnnnnnnnnnnnnnnnnnnnnnnnnnnnnnnncagagtaaaataattttgaataaaacctggagactgtggtggctaaagctgatgttccaagataaaggagtagagagatatgaattcattgtttatgaacatgttttaaagtacgtaaattcaagtccacagcatagaaaccttttggacaggtactgttggaattgtagtattgatgrgactgattttcttaaggctgatgaaaatggtttgctcaactgtcagctaaaaggcttccattgcttctgtataacagcttaagtcttacaaattgttgttatccccattctcctttaaataaccaatgtttctgaaattgcagtgggtttctttttactggctataaagactggacaatattccaattcaatcattttacatatggataagttctgttaacttgaataaaataattgagacagctcccacaaaaaaatttcatcaacgttattttctgtactacggtttgcttgtcagc

SEQ ID NO: 94237 - DNA, 599 bp, Chicken  19866894472105_1
  misc_feature (1)..(165): n is any nucleotide
nnnnnnnnnnnnnnnnnnnnnnnnnnnnnnnnnnnnnnnnnnnnnnnnnnnnnnnnnnnnnnnnnnnnnnnnnnnnnnnnnnnnnnnnnnnnnnnnnnnnnnnnnnnnnnnnnnnnnnnnnnnnnnnnnnnnnnnnnnnnnnnnnnnnnnnnnnnnnnnnnnnnnccatcaagaaaacccaacgttatcccacggcttctttgttgtttctattggccccagatggaagtctcatccctgctgcagcatcctcagtgacactgcattcccaggcagctgcactgaatccaaccctgtgtstccctccagccccagctacttggagaaatcctgatgatgaataaaacactggagataaaatttcatagtggatgactctttctcagggccattagtgagcctgaaaaatcagactttataatacaaagcaatcttccacctgaactgcaggacagctactctagctccacaatatgttatttaaagcctgttttataatagaatttggtatggcagtatgtataatttataatatattaaaacccatttcataatgtattttaatctccagtgatgaatagctgggacggttttgcagg

SEQ ID NO: 94238 - DNA, 600 bp, Chicken  19866894472105_2
tattactttgagtctaaccttaatttagaaaaatggagtttgcctggttggccatttttgaaaatcagtctacttgcttcaaagcccagagattgagactaagcctctgaattgcaattatttttttccttaatggtagtcagttaagcatactcatcactcactaagaaagaagcttcattttgtcatccattccaagtggtggtggggtctctaaagtgtcagtacagtaactcagatcaaaaagccttatggcttgttgatcaccatttgcctatcaggtgatgtgcaaatgatccwtggaaaacgtaggcaggcttcttcctgaagagcagacttttagaaggctccatctctgaagaccaaacactagcagtacatcaggctgcttgttgaaatatatttctgttgtttttttttgttattcctagtctcattctttcaagtattgagagaacagttttcaaggattaaagtttatggctgtaaatggtttattttctgatttatattgtttagccactgaggggctcttctgtcaaatacagatagctgcaggcatgagttgctggtcaatgagggagacagtgctgaacactg

SEQ ID NO: 94239 - DNA, 600 bp, Chicken  19866894472110_1
taggatgaattacagctagaaacatcatgaatagataataataaagcttgctttctttatgtgaatcaagaaaataaattgagagctactgaattttgaaaatcatacagagaaatctagccatgcaggtcaaagagaaagaaacaaggataacataccaaccatgcaaactttccagtggttaccagtatgataggtactatcctagtgcagtaagatccataagaatctgggttaaatggatctgaaagaaaaaaaataaatcagcttactgtagaactgaatctaagtaggttcctytgtgtatgctgcgatctggaaagaggcagagtagaagttaggtacagcagtaaccaycagaaatccatgcattttccattacaggtacctagtaaaaktggcatattagcatgctcaaaatgcaaagtttttgcagtaccacattactgtgcagtaccaatgcagagtttttgacggtgcttacagaatcagtaacaccttttaaaaaatgtaaacatgtatcatctttattgtggatttaaagattgtggatttaaagggtttaagctttctattgcttaagtactatgggttactagt

SEQ ID NO: 94240 - DNA, 600 bp, Chicken  19866894472110_2
tatgtgaatcaagaaaataaattgagagctactgaattttgaaaatcatacagagaaatctagccatgcaggtcaaagagaaagaaacaaggataacataccaaccatgcaaactttccagtggttaccagtatgataggtactatcctagtgcagtaagatccataagaatctgggttaaatggatctgaaagaaaaaaaataaatcagcttactgtagaactgaatctaagtaggttcctytgtgtatgctgcgatctggaaagaggcagagtagaagttaggtacagcagtaaccaycagaaatccatgcattttccattacaggtacctagtaaaaktggcatattagcatgctcaaaatgcaaagtttttgcagtaccacattactgtgcagtaccaatgcagagtttttgacggtgcttacagaatcagtaacaccttttaaaaaatgtaaacatgtatcatctttattgtggatttaaagattgtggatttaaagggtttaagctttctattgcttaagtactatgggttactagtgactttgttcaattgtttgtatgaagggaaaagaaaaactgtaaaatgcagtatctc

SEQ ID NO: 94241 - DNA, 600 bp, Chicken  19866894472110_3
aaaatcatacagagaaatctagccatgcaggtcaaagagaaagaaacaaggataacataccaaccatgcaaactttccagtggttaccagtatgataggtactatcctagtgcagtaagatccataagaatctgggttaaatggatctgaaagaaaaaaaataaatcagcttactgtagaactgaatctaagtaggttcctytgtgtatgctgcgatctggaaagaggcagagtagaagttaggtacagcagtaaccaycagaaatccatgcattttccattacaggtacctagtaaaaktggcatattagcatgctcaaaatgcaaagtttttgcagtaccacattactgtgcagtaccaatgcagagtttttgacggtgcttacagaatcagtaacaccttttaaaaaatgtaaacatgtatcatctttattgtggatttaaagattgtggatttaaagggtttaagctttctattgcttaagtactatgggttactagtgactttgttcaattgtttgtatgaagggaaaagaaaaactgtaaaatgcagtatctctgattccctcaactactcagagatctgcacagtgaaggcag

SEQ ID NO: 94242 - DNA, 600 bp, Chicken  19866894472135_1
aatctccatgatcttgtagacttcaaaggcaatgaaaaggcaattcaaacactgataaaattggtgtttgagttagttacatttcaacgtaaatgaaattgtcaagctaccttcacctcacctacttgcaggattgtataatcttcatctgtttgttctcagataagcaacagttgcaaaactagtcagcaaacatacttatctctgtagtcacgctttcacgtgagaaaaactgcaaatgcttactttctttgaagtatttttatgaattttgttcaggctttgtgtgcttaaaatagmttaaactaacatgttggatgagagcaagtcaaaartggctgcaagcttttaacagtagacctaaagaaatgtaacagttcagttgaaattattttccatcttttcagtgtactagggagattctctagtaaataacatcattttttcaacgatcagttttaatttgtgtctccactaaagagaaaaaaaaaagctgttgaaaaacaatcagagttcaacaaagtagaaattagcatagacttgtagacttgagaatggacttgagaaaaatttcctagttacagtgcctcatagaagctg

SEQ ID NO: 94243 - DNA, 600 bp, Chicken  19866894472135_2
aaaggcaattcaaacactgataaaattggtgtttgagttagttacatttcaacgtaaatgaaattgtcaagctaccttcacctcacctacttgcaggattgtataatcttcatctgtttgttctcagataagcaacagttgcaaaactagtcagcaaacatacttatctctgtagtcacgctttcacgtgagaaaaactgcaaatgcttactttctttgaagtatttttatgaattttgttcaggctttgtgtgcttaaaatagmttaaactaacatgttggatgagagcaagtcaaaartggctgcaagcttttaacagtagacctaaagaaatgtaacagttcagttgaaattattttccatcttttcagtgtactagggagattctctagtaaataacatcattttttcaacgatcagttttaatttgtgtctccactaaagagaaaaaaaaaagctgttgaaaaacaatcagagttcaacaaagtagaaattagcatagacttgtagacttgagaatggacttgagaaaaatttcctagttacagtgcctcatagaagctgaaaataattgaattttccttttttttaagttttca

SEQ ID NO: 94244 - DNA, 600 bp, Chicken  19866894472135_3
gattattttcaccatcactataaaagtgcctgatctgggagtctgagctctctactatgccttcatttaattgtagaagagattatgtcttctggtgagaggtactcataaatgcacatgaatacacaaatgattttattttcattgcttaaggtcaagatacgtgaataaataccttcagttttcacagagatacaatatacttaaattacttcaaaagtaattcctcctattaatttccatggaaactacaagaaagagtacagtagcactgtttgatagagcacattctcatctgcraaacactatttttcaacacagtcaccaccattagccagtatgtaatgctagtaaaaatctacaccagcagaggtgactcactgtcactgtcactactgctggaacacaccacacacaacctcattctgcccacatccactgtttggtctccgtcaatattcagcaagtgtcaatgaatatcagcaggtgtcattttgtctgcacagaggaattcagtgatgtcccttggattcatagacatttccacgtcagatgccatttagtcagacaatgccaatcaatgacataatgcctgcctta

SEQ ID NO: 94245 - DNA, 600 bp, Chicken  19866894472137_1
atttcacctgtatagtaatgatatttttagcaagctaatgttgcattataatttgcttagcacaacagaaatatcagcacagtatttttcaccttgtctttagaaaatgcatacacgtgcatccagtaaaccacaacatgttttgggtatacgttttgcattttgtagatttattgcttaggtcaactacactgcaacattcttatgatcataagccaaggtacaacctatgaaaagggaaattagtgaatagaagtgctttcttcctactgctgtcatccaatgaactttcgaatttgyatgaaacactgaaagtctgtacctgggtaccttctcccaaaataggaaaaaaatkgtgatggcataacaactgtgaccttaagytttctttcatgagtgggcaagaacattattgcttgatttgattggtaccatcacatccatggagtaaatatccaatggttcatccacacaaacaattaatacatgctgaggaggagacatgacaggaacaatgttaggaaggcaagagctttgtataaaaggaataaaggcctcacttagcatgcatacattgcttacaaataaaaatacacctta

SEQ ID NO: 94246 - DNA, 600 bp, Chicken  19866894472137_2
cttagcacaacagaaatatcagcacagtatttttcaccttgtctttagaaaatgcatacacgtgcatccagtaaaccacaacatgttttgggtatacgttttgcattttgtagatttattgcttaggtcaactacactgcaacattcttatgatcataagccaaggtacaacctatgaaaagggaaattagtgaatagaagtgctttcttcctactgctgtcatccaatgaactttcgaatttgyatgaaacactgaaagtctgtacctgggtaccttctcccaaaataggaaaaaaatkgtgatggcataacaactgtgaccttaagytttctttcatgagtgggcaagaacattattgcttgatttgattggtaccatcacatccatggagtaaatatccaatggttcatccacacaaacaattaatacatgctgaggaggagacatgacaggaacaatgttaggaaggcaagagctttgtataaaaggaataaaggcctcacttagcatgcatacattgcttacaaataaaaatacaccttatcctttgtttttccaccccactcccagctctggctctttttggacctttgctcaa

SEQ ID NO: 94247 - DNA, 600 bp, Chicken  19866894472137_3
tttttcaccttgtctttagaaaatgcatacacgtgcatccagtaaaccacaacatgttttgggtatacgttttgcattttgtagatttattgcttaggtcaactacactgcaacattcttatgatcataagccaaggtacaacctatgaaaagggaaattagtgaatagaagtgctttcttcctactgctgtcatccaatgaactttcgaatttgyatgaaacactgaaagtctgtacctgggtaccttctcccaaaataggaaaaaaatkgtgatggcataacaactgtgaccttaagytttctttcatgagtgggcaagaacattattgcttgatttgattggtaccatcacatccatggagtaaatatccaatggttcatccacacaaacaattaatacatgctgaggaggagacatgacaggaacaatgttaggaaggcaagagctttgtataaaaggaataaaggcctcacttagcatgcatacattgcttacaaataaaaatacaccttatcctttgtttttccaccccactcccagctctggctctttttggacctttgctcaagccagtttaacacaaagaaacagcaggaa

SEQ ID NO: 94248 - DNA, 600 bp, Chicken  19866894472139_1
ttttgatcccccccccttggtgtggagcttactgttactctgctaaaattaactctttttcctgggttgatgacactttaatactagacttttgctgacctccaataaatgttgcaaacaaaagcaaactaccatccaccctgagaaagctttgttacacaaaagttaactggatgcctttatataaaaacaaaacaaaacaaaacaaaaaaatcccacaaaagcaaacaaaaaagacaaacaccgagatgtacataatttatttgtcctgatacctgtgaattatacctttggtcttcrgaactgcacttgctcacaaagcaggttttgctacagcagatgagaaagaaatatggtttatttacaggaaaagaaaaaaaaaagtgtaagaaatggtctgaaaagaatgtctgaaatctgtttgtaacttgacatcacactgaacaatactgcaggttcccatttgcagaggtaatggatttgatgctgttttaatcctatgtttatgaatattgcagttttttccgtatccattccatcacaccacgtttacgggcagcatttgttaaagaatgctaccttttccttcacaagattgca

SEQ ID NO: 94249 - DNA, 600 bp, Chicken  19866894472162_1
tcaagagtttccaaagggcacccatgtgttgctgagagcagcctgctccttccctggcccatggatcagctggggcagtgcagacatagggctgcacttatccaagtggcagaagtggcagcaggagagctggctgatggaagagggtgagagagctccctccccactcccccctattgtcatggtcacacacaattggtgcttgctgacagaccccatacaatagcagcataggtataaaaccagcaaatcatgccaaaacagaacaagctgtggaaacaagggctgtaaatcccaacwgagttgagtgtccccttgactgtaaacaaatggtaatgactaatattatcatacaaatgcatatatggggatgagaagagatgcctgaaggaaagacacaayacttatctaaaactgttttgcaagtggtagctactgaataaaggtcagaagcaatatttgattggaaaaacactgtgcagagaaaaatgtagagaaaaatctacagcagctgagtctgagggctgaaagtttcatctaatagaaaaaatggatgcctgttgatgtggggaaagcacaatgtgaaacatgtttgctgag

SEQ ID NO: 94250 - DNA, 600 bp, Chicken  19866894472162_2
caagtggcagaagtggcagcaggagagctggctgatggaagagggtgagagagctccctccccactcccccctattgtcatggtcacacacaattggtgcttgctgacagaccccatacaatagcagcataggtataaaaccagcaaatcatgccaaaacagaacaagctgtggaaacaagggctgtaaatcccaacwgagttgagtgtccccttgactgtaaacaaatggtaatgactaatattatcatacaaatgcatatatggggatgagaagagatgcctgaaggaaagacacaayacttatctaaaactgttttgcaagtggtagctactgaataaaggtcagaagcaatatttgattggaaaaacactgtgcagagaaaaatgtagagaaaaatctacagcagctgagtctgagggctgaaagtttcatctaatagaaaaaatggatgcctgttgatgtggggaaagcacaatgtgaaacatgtttgctgagtgagaaaaatgttgattgggaaatatcaaaagcagctgttgtgtgacagtggaaaaccaattaaataaatgtgacatggcagcaaaatagtccatgtggatt

SEQ ID NO: 94251 - DNA, 599 bp, Chicken  19866894472166_1
  misc_feature (1)..(90): n is any nucleotide
nnnnnnnnnnnnnnnnnnnnnnnnnnnnnnnnnnnnnnnnnnnnnnnnnnnnnnnnnnnnnnnnnnnnnnnnnnnnnnnnnnnnnnnnnnccctccctgggctgctttcgatctcctttttgatggaaatatgaaaagaaaaaatagggctgctcttattctttttgttttgttttgttctcttttcccctacgtctttcgcaggacgttgggatgtctctgcggtttgaggagctcagcccgcgtcccgcagtgagagaaggatccgcgctcattgataacgtgataaccagcgctgcrtccccccctgcactgaacgcttcgtgcttatgtttctgtcacacttggtggtgttttaatccctgcatcgtagcgagcgctcggctctcactcgcactgccggcaagcagacgggcagcgaactttcctccctttcttgttccttctttcctttctaaatgaaacacgcgggctttgggtaaggaagggagaaatccgatttacaaaacgaaatctgccccgggatggtttttcttgtttagcgggagatgctcggcacaccgggctctcttccttatcgccgtgtgaacggcgctggt

SEQ ID NO: 94252 - DNA, 599 bp, Chicken  19866894472179_1
  misc_feature (1)..(179): n is any nucleotide
nnnnnnnnnnnnnnnnnnnnnnnnnnnnnnnnnnnnnnnnnnnnnnnnnnnnnnnnnnnnnnnnnnnnnnnnnnnnnnnnnnnnnnnnnnnnnnnnnnnnnnnnnnnnnnnnnnnnnnnnnnnnnnnnnnnnnnnnnnnnnnnnnnnnnnnnnnnnnnnnnnnnnnnnnnnnnnnnnnnagtccttgtagaagccaggccagccaggggacaggatggtgccactgggagacgtcaggtggcccccgcatggagctgcaacgaggaaaggacacattcaggtgacaaacagcacggaaaycgctgcaggatcacagccacccatccctgccacacaacagctttcacgcactgctgtttctcaggtgttaaaaccaaccagaaccagactgcaagaaattgccttttttaagttcacgctgacgagctgcagcctgctgctgtacctgaccttgtgcagcagctctgagcagacagggcataataatcatcattagatataaacccgaggaaaccgcaaggtcaggctggatttcagcagctgcgggtgccaggaaggctttcatatctgcgggtaattgagtcatgtcttttctgcca

SEQ ID NO: 94253 - DNA, 600 bp, Chicken  19866894472181_1
cactgctaatgaaatgctaaactgttgagagtctctcattaatttacaggagtattcttaattaggggagtaatcttgaccttctggaacaagttgagagctggtccaggcacaccagatcactgagatatcttttttactttctaattctttggcatttcctgttaagacagcacaagtatgcttttcatgtgtgggagaaaagcactctaaggcattgcagtcactcataccaagatgtcaaccactgattccactgataggttcttttcattatttactgttggaagcttgctgatyggtaggccatttgcaatgccttgtgcagtatccagcctgcagcctgaaccmatgttcttgaagaaattgatgctccctcctgtaagaagcagagaaagattgtacttgaaggaatgggaagggcattagcaaagcaaacaatatgataggctgcgtgaggcatagagataaataacgctgacagttttacagtagcactttatcaatcatgggtatgttcaaagctgaaatacactgttcagttctgcttacgctacygcaaaaagaacttttgataaagtgtgtggatccagagccaaa

SEQ ID NO: 94254 - DNA, 600 bp, Chicken  19866894472181_2
gtattcttaattaggggagtaatcttgaccttctggaacaagttgagagctggtccaggcacaccagatcactgagatatcttttttactttctaattctttggcatttcctgttaagacagcacaagtatgcttttcatgtgtgggagaaaagcactctaaggcattgcagtcactcataccaagatgtcaaccactgattccactgataggttcttttcattatttactgttggaagcttgctgatyggtaggccatttgcaatgccttgtgcagtatccagcctgcagcctgaaccmatgttcttgaagaaattgatgctccctcctgtaagaagcagagaaagattgtacttgaaggaatgggaagggcattagcaaagcaaacaatatgataggctgcgtgaggcatagagataaataacgctgacagttttacagtagcactttatcaatcatgggtatgttcaaagctgaaatacactgttcagttctgcttacgctacygcaaaaagaacttttgataaagtgtgtggatccagagccaaatggggagcatgatgagaaaatgaggaaaatctacagggcatgactggagac

SEQ ID NO: 94255 - DNA, 600 bp, Chicken  19866894472181_3
gataggttcttttcattatttactgttggaagcttgctgatyggtaggccatttgcaatgccttgtgcagtatccagcctgcagcctgaaccmatgttcttgaagaaattgatgctccctcctgtaagaagcagagaaagattgtacttgaaggaatgggaagggcattagcaaagcaaacaatatgataggctgcgtgaggcatagagataaataacgctgacagttttacagtagcactttatcaatcatgggtatgttcaaagctgaaatacactgttcagttctgcttacgctacygcaaaaagaacttttgataaagtgtgtggatccagagccaaatggggagcatgatgagaaaatgaggaaaatctacagggcatgactggagacatttagtttcagaagtggtatttcttccatctttaatatataaatgaagaaagaaaaagaaattacatcctgcatgggataatctaaccagtagtccataggggattaggggaaatttttcctacagtcaaaatatgcataatgtgaagcctggcattgctaaaagctttctttgaagtatgtggctcagattcaagttagcagcct

SEQ ID NO: 94256 - DNA, 547 bp, Chicken  19866894472195_1
tgattcagtgtttgttgatcctcccattgctctctgctccctgtcctgaggttgaaccccagatctgaaggctgacccctcaaaaagccccgggacagctgctggtcctagctctgtgctgttagaacagcacaggctaaagccagcctccaaaaatcactgatggaggatcgtgtgcatgtccatggggacgtacacacccatatatcttatctctccctgtacaggcaaagcacgaggacagggagcagtgaaagctgggagcacagttccccctctgagcagaacacagactgctcytggcttgcccatgccattttgttatgttttgtttcccctcatctaaccccttacaaaaaaaaaattactgaagagctcaaaatcctaggggcaagctgttctgctcactgctttgttgcagcccatgtttgcctgtgtgcagtgagctcagtgcctgagctgtgcacagaacatgacagacctcagagctgtacaatgctgagatcatctcagggatgcaaaaataacagccaggcagcagaaatct

SEQ ID NO: 94257 - DNA, 600 bp, Chicken  19866894472211_1
tcgcagccgcagagcagggggaacgctgccaaggctttttctgggaatttgctctggtcgtgctgcttccccgggagcactcagcggatgcatgttgtttgcaggggggggggaacactcaaatgtcagcatctgaagggatcacgaaggaagcaaggcgagcaccaactactcttccacctctcagaggtgcctgcatacacacagccttggtaagtggtgggcgatgacttgttgagaaatgatattgctaagcagtaaatgtgaccctcttgtgctatttcagaaagagattttgcktaaggcagcctgccccaaattgccagctgcaaaaatgggggctgcatgtggcagtgataccccagccaagttcactcctctctcttgctgagatgcagttgtattttcacttgggctggatgcraaacagtgcttaaaacaccacaaattgagatgcattggagaacacctttttaagtcacctgccttcttgttgcagacacgattatacctacgcagactaaactgctgcagggaaggcagagacgcagtgctcactgcggctgcttgggccgttcatttgttagcatgggtttggat

SEQ ID NO: 94258 - DNA, 600 bp, Chicken  19866894472211_2
gtcagcatctgaagggatcacgaaggaagcaaggcgagcaccaactactcttccacctctcagaggtgcctgcatacacacagccttggtaagtggtgggcgatgacttgttgagaaatgatattgctaagcagtaaatgtgaccctcttgtgctatttcagaaagagattttgcktaaggcagcctgccccaaattgccagctgcaaaaatgggggctgcatgtggcagtgataccccagccaagttcactcctctctcttgctgagatgcagttgtattttcacttgggctggatgcraaacagtgcttaaaacaccacaaattgagatgcattggagaacacctttttaagtcacctgccttcttgttgcagacacgattatacctacgcagactaaactgctgcagggaaggcagagacgcagtgctcactgcggctgcttgggccgttcatttgttagcatgggtttggatttctgatgactcagaagggagctcggcttcctctcagctatttgcagatctaaagatctgttgtactgtggttgtgaaccaggactctgaacgttgtgcagagctgggaccaaaagctgcctca

SEQ ID NO: 94259 - DNA, 600 bp, Chicken  19866894472216_1
tggaagtgttaacctgaaatggcaaaagcgctaagcttttaactctttagaatatttaacatataaaaaaattgcatgaaactttcattaatttaccataaccattaatactgctaagagttcaatcatatgtcttaaatctgagattacaacagcacagggaattgatctttcaaaataggtaattcatgcaacttgctaagtaattctgaagagtagttatccctcagaagagaattctccactggttttcatgtagttttctatcagatggcaaacatgtctcccacatgatttccscaatccccaataaggcctgaatgtgttcctgagccagtgcaccccttgatgagaagttaactaatgatgttacataaatatgtcttagcagactgatgtgacttgcctaggtttacattcccacagggttcttgcagaagtccagcagatgtgtctcctggcagaaaatcagccaaataatgagaaaagtcttcaacttacatatgctgatatcagcccagatttgatcggctcctctgagtgcttctttcatcaaaacttctgtagcactccggcaggaattctctaactcttcaagag

SEQ ID NO: 94260 - DNA, 600 bp, Chicken  19866894472235_1
gtgttttttggttttgtttgactcatggattaggagtctgagaagaaagaggcaggtcagtgattttagggaggacagttgcaaaacacttggggatgagagaggtaaacataactcccattggatttgtttgtggcatttcaaatgcatcttgttctgtcgtatgaacaaatactcattcttgtttggaagtaaaaacagcattaagcacatttacaatgtgctccaggcaaagtacctgctccaggtgtgtggctggtgggatggcaggggaatcacaccttgcacggctgtgctagrcaacaagcattgtttatagctttgcaagttagacagaactctaaaatccaggggattccagtgcttaatttttctatgctatgtgcaaaaaacatggagaagaatgtataggccttactgagtgtcagaacagctggaaattcaagtgttacgttttagcatgtaactttgcaaccttcatttttcttcagatgctgtagggaatggggtggctgtgctgtttgggtgcatgcattacagtgtattttgtgactactttagatgcatgctgcatcttgtagtgtgctattcaatgaatgc

SEQ ID NO: 94261 - DNA, 600 bp, Chicken  19866894472236_1
actacacgtaagaatacctaatcagccacttctttcaaagtaggtaaacaagtttcattttaaaaactttacaattccttcattgcaaaggatgtatttattaaaagaaaaaaactactgccttttgacaggatagctatttatcccattaatttattattcatgtaagcggcatatttaaatgttctataacctgaaatagtgcctgtttattcctggaagtatcttggcatggttaggtgtgcactaagacagaaaaagactaagaaaaaaaaactgagttcagctgaaaaaaaaaamaaaacccagtcttttccctgtcacgatactttgacgtatattccatgcaatgcttacacaatatatttaaaataaataaatgaataagttgtactaagaaacaaaattcttctgaaggtgtaggtacctgcaaacaatggagcagaaggtctagatattgttaacacattgtctctctatgttaatcgcagacttgcctgttaattaaaaaagagttcgactggaaaaatcacaattgacaaattaccaaaaaaagcaatggaatgcagaactaagttacttaacttgagataacacaca

SEQ ID NO: 94262 - DNA, 600 bp, Chicken  19866894472248_1
gatctaaagaagtttcttcttttcaggggcatatctctttcaagccaactcttgatcaacagcgaacctgtgaaaattgctcacagtcactcctggatggagattttattgttaagtacgatgtgaagagaacaactccagataatctgcaggtaattttgcagataaatagctggcaattttgcactgttgaatgggcttatctttcacagataaatgttaaggagtagtgaaggccaattgttccctaaagggcaggagctgactatgacagcacagcttcaccagccaagagtccartccccagaatacctaagcaaggcagactcagagatggtattcaaattcagccaagagtccaggtcatcaggcaaatttgtaaggatgaggcaagttgtggtrtgaagtcagactacagtgtgggttccaaatcagcccatggacagatgagagcaggcacagttgtgacacygctagagacaggtgtaagtcaagcaggctcaggcttgaacttaaacaacactcctgggctcatagatggaggtaaggctggaaaggatttgttagtttacgcagtggctacagactaaatcaaagtac

SEQ ID NO: 94263 - DNA, 600 bp, Chicken  19866894472248_2
attttattgttaagtacgatgtgaagagaacaactccagataatctgcaggtaattttgcagataaatagctggcaattttgcactgttgaatgggcttatctttcacagataaatgttaaggagtagtgaaggccaattgttccctaaagggcaggagctgactatgacagcacagcttcaccagccaagagtccartccccagaatacctaagcaaggcagactcagagatggtattcaaattcagccaagagtccaggtcatcaggcaaatttgtaaggatgaggcaagttgtggtrtgaagtcagactacagtgtgggttccaaatcagcccatggacagatgagagcaggcacagttgtgacacygctagagacaggtgtaagtcaagcaggctcaggcttgaacttaaacaacactcctgggctcatagatggaggtaaggctggaaaggatttgttagtttacgcagtggctacagactaaatcaaagtactttgtttttgatcaattttatctttgtaataaacaaaagctattgggttgctgacatcttatgtcctttttcttagattggcaatggctactttgtacactt

SEQ ID NO: 94264 - DNA, 530 bp, Chicken  19866894472248_3
ctggcaattttgcactgttgaatgggcttatctttcacagataaatgttaaggagtagtgaaggccaattgttccctaaagggcaggagctgactatgacagcacagcttcaccagccaagagtccartccccagaatacctaagcaaggcagactcagagatggtattcaaattcagccaagagtccaggtcatcaggcaaatttgtaaggatgaggcaagttgtggtrtgaagtcagactacagtgtgggttccaaatcagcccatggacagatgagagcaggcacagttgtgacacygctagagacaggtgtaagtcaagcaggctcaggcttgaacttaaacaacactcctgggctcatagatggaggtaaggctggaaaggatttgttagtttacgcagtggctacagactaaatcaaagtactttgtttttgatcaattttatctttgtaataaacaaaagctattgggttgctgacatcttatgtcctttttcttagattggcaatggctactttgtacactt

SEQ ID NO: 94265 - DNA, 600 bp, Chicken  19866894472250_1
aattcataatttcaagtcgaatagctttgctgatcgagtcactacttccagatgtgctgagctttgatctatctgtaacatcatctcaaaccttaaaacaatctattgaaactggaatgaataattaaataatcttagctgctactagtgattaatgtatagattatacttatgtacatcatagcctttaggaaccttttagctgtcaccctgcaaacttgtactaatgaatctagtctaataattgcaagaatattcacatggcaatatgcatctgaggtagattcccacttctgcttyccaaacaaaaggggcataaaatcattacagattctgtgaaggaaaaagaacaaaaactaatatagacagtaaccatagagggggaaaagaagtggaaccagctaaatgcacagcaaataactgcaaaagtgacatcaaagaatatgttgtcagtaccacagtttggctatcccaggtacaacgtgggccatttggggccagagaacatgacttaagggttttatgaagactctttttgccacacagttccataattgaaacctaaataaaaattaagcagcagacaacaktgaacaggct

SEQ ID NO: 94266 - DNA, 600 bp, Chicken  19866894472250_2
cttctgcttyccaaacaaaaggggcataaaatcattacagattctgtgaaggaaaaagaacaaaaactaatatagacagtaaccatagagggggaaaagaagtggaaccagctaaatgcacagcaaataactgcaaaagtgacatcaaagaatatgttgtcagtaccacagtttggctatcccaggtacaacgtgggccatttggggccagagaacatgacttaagggttttatgaagactctttttgccacacagttccataattgaaacctaaataaaaattaagcagcagacaacaktgaacaggcttgcagtcctcatctgttagcacaagatgataaggaagaaatggaagcaggatagcaggatagctttatgggtatagtcatttatttggtcagtcctaggtcattgtgatgtgccttacaattctctttctcccaacgtgtttttaaaaatgcaaaatctttaataatctttctttaaggaggttcgtggcagacaccatccacctggatatatatgtggtgtctgcttgataccaagtcttaatcttctcatgtttccaatatgatcttttttcccctctttttactagg

SEQ ID NO: 94267 - DNA, 600 bp, Chicken  19866894472256_1
ttgtccaagaagaatttcttgtttcacaaatactggtgttttactgtgatttctgataatttttcccattttcctgctgttttgaattgatagtgtgcccttaggtccagacaactgcttgagtcatgttcacattggaacagggagtactctgtttagtttctttggcagaaaagacagcatgctgtggtttaggaaagtcctaccagtggagatagctcagtgaaacagtgcttcatggtgtaagcaaaagtgacttgtaagtaaaaatgagttgccattgacataacctttgaaatrctttcagtttatgctccgatggaatttgtatgaagaattgcattctgtgtgcacctctgaaaagccaaagtcacactgcaaaagaatgaggtttcaataacatgttttattctgtggtttctttgtgtaattttgcatgataaatattgtgcctgtggatgtgttgttagtcagttttggtcctttgactatctaatgtattctttcagtaacacatgacattttacttcagagtaaaacaatcttcagatatctgggaagtcagtgctggaataagaatcttatggagaaaaatgccgt

SEQ ID NO: 94268 - DNA, 600 bp, Chicken  19866894472262_1
tggcctcaccaccctgtcctctatgtccccctcctcctgctgcttgtgtctttagcatcatctcgtcagtcttctgaagaaaggaggtgcctggtgacgcaaccctccaaaggactgggggtggcttggctgtccccaagggtggatgaaggtccctttgtctcagtggccaccagtggggctgtgtgtccatctggtgggcccagtggggctgtccagtgggtccatgtgtctatccaatgggtccccatgtccttcccatggcccctcccaggggcagcacatccaaaccggggaccygcgccccgctgctcggtgccgggagctggggacacagtgaccaggggagctggcttcccgggaggggctcactggggggactgtttgcacttccttgtacattatataggagagtttatttaatgatgggtgtgcgttgggtcggttctcacaaccagccccagcctggggagtgtgggagggatgggtccctgtgcccgcagccgtcagtgccacaaaccagccaggagaatgaggcctcttccagctgagtttgctccaagttgctctatgtaaatgacaacggcaacaaattctttg

SEQ ID NO: 94269 - DNA, 600 bp, Chicken  19866894472266_1
gagattgatttcctgcatgtttaatgagataggctgactgtgctgagttctgttactggccccagagaaagaggaatgctttattggatgtcaaacagtctgcctggaagagactcagtacagtccttcttcaggtctgctggctttctatctctgaagcaagtcaatttgatgtggacatccagccacataattggctttttaaatctgtaaccacaaagcaaccaatttctcactggtcagtgaaagctcagtaccattaaccatcccaccactgtcctctactgaaatgtctgtcakttagaacctccactggtccccaatggaggagagggtgacacctggagaagccttcctcccctcacacagatgctcmaagagcttctcgggcacttatgaggggcagcatctccggagtgttatcatgtaggaggctaaaagcttttcccagcccaagtccatgttcaaattggacatttttgagctgcaaaataatcaaagttgtgctccacaatgtctagctgcagaaacatcacttaggactctccagccaggttctgtatggcattagtcagtagctgtcagtgtggagcccgagct

SEQ ID NO: 94270 - DNA, 595 bp, Chicken  19866894472266_2
tgctttattggatgtcaaacagtctgcctggaagagactcagtacagtccttcttcaggtctgctggctttctatctctgaagcaagtcaatttgatgtggacatccagccacataattggctttttaaatctgtaaccacaaagcaaccaatttctcactggtcagtgaaagctcagtaccattaaccatcccaccactgtcctctactgaaatgtctgtcakttagaacctccactggtccccaatggaggagagggtgacacctggagaagccttcctcccctcacacagatgctcmaagagcttctcgggcacttatgaggggcagcatctccggagtgttatcatgtaggaggctaaaagcttttcccagcccaagtccatgttcaaattggacatttttgagctgcaaaataatcaaagttgtgctccacaatgtctagctgcagaaacatcacttaggactctccagccaggttctgtatggcattagtcagtagctgtcagtgtggagcccgagctaacaaggtatgtggaagcttttatagtgcttttgagcgctgtgctttgctggaagtgatacaggagcactg

SEQ ID NO: 94271 - DNA, 600 bp, Chicken  19866894472268_1
ggtccgtatcccaacaggtgaagactcaagctcagaccaccctttgacacatctttaatgaactatatgaaaaataagctaggacctttacaaaagcagaaggcagatggtctttgccagaagcagttcatcacaatgcaaaacaggagcgggagaaatgagaagggtgaccagcaatcctgcagtgctacctacatccacatggtgaattaaagatacattttgtattgcagagatgtggttgaatgtcggccttggagaaggcacagcaactcagcaaatcaaacttgcaaccccatkccagtgctgcagggtaggaaagtcacacagtcagaaactgctgcaccaaacaaagtaactcgaccaagtacttaatctcagtagccaactcactgcaggttagtgcttgtgctttaagagtgaaagtctatacgagagcttcaacctaaatgctgcacaataaacatcttaacccagaagcaatttacaaattttttctatttttctgaacatttgctatcctattcctcaacatcccacacctcccctcctgatgtttacacgccaagtagagcattcgtgtaagcaaaacaaggtcat

SEQ ID NO: 94272 - DNA, 600 bp, Chicken  19866894472269_1
tggggaggtttaaagaggcgctttttcttttgaaaagagcgcttgagtttgtttatttttcatcctaattgatcattactaattaattcaagcatatgttttacaaatgaacacaaccaatacattgagtttgtgttgtagctgagcatttgaatactggtcaggagagtaatatattaaattttaattagttttatttttttcattaaataatccatgagttcagaaacacatttacctaagaaacatctgtgttgattgaaggtgttgttgcacacacacaagcaatgcgtagttagrattggggagcatttctcacctacttcagtgtaaagtctagcggttcaaactgcccctctcagtttgagctaagcaggcagatttatcaaatggctgataaatgttcaaaaattcatgctgacaacagggccagcaaagcaggtatctgagatgcagtactgtagcaaatgctggggctgtggtaatagtttaaactgatgctgctgcctgataagtaaaaatacgtctaaggattcaatttccttcaagtggaatttgctgtaccttctggtggaactcttgatgtttgatgtattgact

SEQ ID NO: 94273 - DNA, 599 bp, Chicken  19866894472270_1
  misc_feature (1)..(72): n is any nucleotide
nnnnnnnnnnnnnnnnnnnnnnnnnnnnnnnnnnnnnnnnnnnnnnnnnnnnnnnnnnnnnnnnnnnnnnnntgctcgtgttgctttgtggtgggaacgtttcagtatagctgagcgggcacgaattgctgcgggtgggagcagaaggcagtaaggaggctgagcagcacaggggggtggtgaggtgatggtgggggcacagcgggggtcccgtccccaggtcttgctgcaggcgtgtggctgcaggagctgagcttggttggttcctgcagtgtatggggtcacagtgtctgcagttcygtgctgtgtcacccggctgtaggctgaggtgtcctctatggctgcggtaggctggagtcatgctgggagtactgctggccgtctggagctgcggatgtgagatgtggaaatggctcttccatcatgcctgcgggtcacggaaacatagaatggcttgggttggaagggaccttaaaccctcccagctccaacccctgctgtggactgggtgccccccgccagctcaggctgcccagggccccatccaacccggccttgagcacctccagggatgggacatccccatcataaatgagttc

SEQ ID NO: 94274 - DNA, 600 bp, Chicken  19866894472270_2
gatgtggaaatggctcttccatcatgcctgcgggtcacggaaacatagaatggcttgggttggaagggaccttaaaccctcccagctccaacccctgctgtggactgggtgccccccgccagctcaggctgcccagggccccatccaacccggccttgagcacctccagggatgggacatccccatcataaatgagttcccacgtgcaggctgtgctggcacaggccgtcttcctgcttagctccgagcagcccacacgctcgtggcttggatgtgcaaatctaataataaagtgatgcrgatcccggaggaaagcctccccggggcagcgcatggtgctgctcgttggaaacctcccatcagtgccccagtctgtgctctgggacatggcccggaggtgaaaggctccatcatccccaatcccctttagccgtctcggcctctgcttgtgtatttttaacctttttgctgtgctaagctgcccggagctgaagtggccgcggggaacgcagcctgtcactgctctgccaagcccgggatttcaggatcagtgcctctaatctctgtaacctgaaataccttgttctgccagcggcctgc

SEQ ID NO: 94275 - DNA, 599 bp, Chicken  19866894472289_1
  misc_feature (1)..(52): n is any nucleotide
nnnnnnnnnnnnnnnnnnnnnnnnnnnnnnnnnnnnnnnnnnnnnnnnnnnnaatctcctttttaatctccactattactaaaattttaacaaaatgttattgtcagtgttttttgcctatttcaggatttttatccagattaaaaagttcaagttcacaaaaaaacattgttctattcgtcctaaatctgtattgcattgcagactccaaaaacatcaccttcattggaagaaaaccttaaaggtcacacatcagctactaatctatattagaggaaagtaagatgctaataaggtctygtcctctgctacaccagttcacctaactataaaacaaagttcttcccagaacaattaccttgtggcattgcaagactgtagttactctacagaaatccagttagtaaataaatctattggaaacagacatttaagacatttagttactataagatctaacagttatttccatttgatcaagatgtaatttgagtaaattagcattccagtaaaatgctttttatgcctaagaaaccatacacagaaggaaagcatatcagatctgtaattcatagtgctaacaatgatgccttatttta

SEQ ID NO: 94276 - DNA, 599 bp, Chicken  19866894472292_1
  misc_feature (1)..(43): n is any nucleotide
nnnnnnnnnnnnnnnnnnnnnnnnnnnnnnnnnnnnnnnnnnncgcatttttcacttacatgatggcaaacaccgtggtcgaattttccactgaggtttcccagcatctgcagagtcttgtcgatagccccctctgtcagaaagtgttgggctaaggagctgctgctggctacttgtctgaatggagaaaaaaaaaaaaagaatctgttaacaatccccactgcaaggggataatcccaagaagggttatctagcctttctattccacttccaagttttgcagacaaatactagcaaaargtaaggcagcaaggttttcattctttgctgccccaacaggctacaactaaaaagaccaagaaagawcaacaaaaaaagagcacttgggctcaattccattatgcagccacactayaacatataatatagctttcagacgtctgcagtggagctcctttgtagtactttcttcatttcttaccctggaaaagctcagggtagccatcctctatgccaagtgctcactcccagtgtaaacaactatagaatgcataacaggaaaatttcaagttcctgaacctatagaaaactcacgctag

SEQ ID NO: 94277 - DNA, 600 bp, Chicken  19866894472292_2
caaacaccgtggtcgaattttccactgaggtttcccagcatctgcagagtcttgtcgatagccccctctgtcagaaagtgttgggctaaggagctgctgctggctacttgtctgaatggagaaaaaaaaaaaaagaatctgttaacaatccccactgcaaggggataatcccaagaagggttatctagcctttctattccacttccaagttttgcagacaaatactagcaaaargtaaggcagcaaggttttcattctttgctgccccaacaggctacaactaaaaagaccaagaaagawcaacaaaaaaagagcacttgggctcaattccattatgcagccacactayaacatataatatagctttcagacgtctgcagtggagctcctttgtagtactttcttcatttcttaccctggaaaagctcagggtagccatcctctatgccaagtgctcactcccagtgtaaacaactatagaatgcataacaggaaaatttcaagttcctgaacctatagaaaactcacgctagagcagaaagttggtgctgcaagttagcgctttacagcactagcaagacagctaactaagccagggaa

SEQ ID NO: 94278 - DNA, 600 bp, Chicken  19866894472292_3
tcttgtcgatagccccctctgtcagaaagtgttgggctaaggagctgctgctggctacttgtctgaatggagaaaaaaaaaaaaagaatctgttaacaatccccactgcaaggggataatcccaagaagggttatctagcctttctattccacttccaagttttgcagacaaatactagcaaaargtaaggcagcaaggttttcattctttgctgccccaacaggctacaactaaaaagaccaagaaagawcaacaaaaaaagagcacttgggctcaattccattatgcagccacactayaacatataatatagctttcagacgtctgcagtggagctcctttgtagtactttcttcatttcttaccctggaaaagctcagggtagccatcctctatgccaagtgctcactcccagtgtaaacaactatagaatgcataacaggaaaatttcaagttcctgaacctatagaaaactcacgctagagcagaaagttggtgctgcaagttagcgctttacagcactagcaagacagctaactaagccagggaattcctgccttaggctatcttgtctttacacctgaaggctaagaccagag

SEQ ID NO: 94279 - DNA, 600 bp, Chicken  19866894472304_1
ataaagatagacagatctgtgagccctccccttctgtgtttcatgttacagaagtttgattattacattacatttgttatctgcagtactgcagggcgagcttataaaaacccagctgtctctgtgctccataaatcaaaagtaatggccagataatcaaaattatgttccaattctagaacattcattactggtggcattgtataaagcagatataaaaacaagcagagtttttgtgctaggatgattagagggaattacattaaaaacatagaatcgttactggtatgttttgactcraagttaataaagagcagtttgctcagcacggttattttaagataaacrgaaaaaataaaaatgaaccgcttacctgacctagtcaggaagcaatattcagtgccctatcttttctgagaactgatttttttctcatttgggcagaatgaaggaaatcaagaaaaatgaccaagagaagtaaatccgacccctaaaaactcatcatggactgggagaggcaacttcaaagacctgctctactgttgtgtctcataacagaagaattccaggctattgcctcgctttttgatcttccccatt

SEQ ID NO: 94280 - DNA, 600 bp, Chicken  19866894472304_2
cagaagtttgattattacattacatttgttatctgcagtactgcagggcgagcttataaaaacccagctgtctctgtgctccataaatcaaaagtaatggccagataatcaaaattatgttccaattctagaacattcattactggtggcattgtataaagcagatataaaaacaagcagagtttttgtgctaggatgattagagggaattacattaaaaacatagaatcgttactggtatgttttgactcraagttaataaagagcagtttgctcagcacggttattttaagataaacrgaaaaaataaaaatgaaccgcttacctgacctagtcaggaagcaatattcagtgccctatcttttctgagaactgatttttttctcatttgggcagaatgaaggaaatcaagaaaaatgaccaagagaagtaaatccgacccctaaaaactcatcatggactgggagaggcaacttcaaagacctgctctactgttgtgtctcataacagaagaattccaggctattgcctcgctttttgatcttccccattttttatgtgaaaagaattcacgctgactagagcctgaataatctgact

SEQ ID NO: 94281 - DNA, 599 bp, Chicken  19866894472308_1
  misc_feature (1)..(89): n is any nucleotide
nnnnnnnnnnnnnnnnnnnnnnnnnnnnnnnnnnnnnnnnnnnnnnnnnnnnnnnnnnnnnnnnnnnnnnnnnnnnnnnnnnnnnnnnngctgctctagcacaaattgggaacaggcgggagaacttaagatgagcccatacaaaatatcttcctgcttaatgtcccctacactcagcagagctggctgtaatcctccaacaaataatatgccaactgctaagctctttgaacctccccagtacaacaaactttcagtggaccaatggtaaatatctgaaagaatttcagttaacatttrcagccttcttcatcctaatacaataactgccatgcccaagaaaaaaatatatagcttattgatccaactgctttgagacataactgattattaacgggagccagtaagaaatattaccctttggttcactgcagtgtaattagggatattaatcaattccacgtgatttcttgcacagattcytgtctttgctatgaaaagtactttaagatccaaaaggataaggaatagcgtagcgagtataggaataatataacagggaatgtatataataaggaaagatatagccattgattagc

SEQ ID NO: 94282 - DNA, 600 bp, Chicken  19866894472308_2
tggctgtaatcctccaacaaataatatgccaactgctaagctctttgaacctccccagtacaacaaactttcagtggaccaatggtaaatatctgaaagaatttcagttaacatttrcagccttcttcatcctaatacaataactgccatgcccaagaaaaaaatatatagcttattgatccaactgctttgagacataactgattattaacgggagccagtaagaaatattaccctttggttcactgcagtgtaattagggatattaatcaattccacgtgatttcttgcacagattcytgtctttgctatgaaaagtactttaagatccaaaaggataaggaatagcgtagcgagtataggaataatataacagggaatgtatataataaggaaagatatagccattgattagcagatgttcatagcttcaattagttcattttctttttaactttctctctctttataagataaactgtcagcactggaaatggcaatggttaatgaaagaagagaaagcattgtgctggccaacagcttttctacagatgaacctaagttgccggaaagtttattggtagctggttctttttttaa

SEQ ID NO: 94283 - DNA, 600 bp, Chicken  19866894472309_1
acagcctcactttgtaccttgcaataataatttagcataaacactataattgccgtatttaccttcatttcataatctagaaaaacattgttataaattatgtaaatttagaaggctgtaacatcagtttgagtgcaggaggaaaagaaagatggtactaaattgattttaaaacaaacaaaaataacaaaggtggttctcatcctcattcagattttcactttctgcttctcccatgttgaaaaagaatgatttctgtgtgtgaggggttcttagcttttatgtctggttagctttttyaattcaggccatctgaggtgattttaggggtgctctgtgtcaccagactgcaggcttctgtaatgtaggcaactaaataatggtgtgatcttagcttttgatgcctgataatgttggtagattggaatgagttggtatgttcctatctgttattgaggaaaactaccctaaaaagacagccaagcaaaaattctaagtataaattatgaaattgcatttggtttcttcagggtggttatataacatttagaagttgtacttgtgactgattaaaaaaaaaaataaaatcaatatcagtaa

SEQ ID NO: 94284 - DNA, 600 bp, Chicken  19866894472312_1
gatatggttaaagtccagaaaaccaccacaaaattgaattagaactagtgacaatgaggggaaaattaacaaaaaaggaaatcttcctagtgctaccaacacaacccgagagcgtctgcaaagggaagtgggcacacagcgtgctgcggtgccaagctgtgcggcactctctcgttctttatggggacactggggatgcttttgtgccacctcggtccagtcgggaggtgctgcagtattcagactgcacgccctgcaccggctgtctccagtggagctctcccctttgtgcccctgggrgcagtgttagcttacagccctgctctgctgctgttgctgcaggtacgcatcgcattaagtctggagacgctcaggcttctttcaaaagaagttgggtttgcttagggcacgttaatggggctctcagaggaaatggatgctgagtagccagaatgccgtcccttattttgctttaatactcctgtgtggaggtctctcctttccctacagagatgggctgtaggccaaaagaagcaggaggttttgtagattgaaaccagcgctgtgacttgcatcctgaaaccactgatgtttaaatgt

SEQ ID NO: 94285 - DNA, 600 bp, Chicken  19866894472316_1
atatcatgcaagacaatcctcgctgcaggtttcatagctaatatggttaaaataatctatgccagaatcaattatttaattgcatcccatattaaagcaaagataatcactggtactcggatctcatctctgtgacgcatgtaaaggctgcagttatgtgaaagccccaccactgtcgtgccttgaatatacagctaccatcagtgctaacagaatgattaatagacatttaataagcgtggcataatttagtggaaatgacccatcccttgcatctgggaaagagaagtttgtccccaygtctttgctaggatttagctcctcaagcaaaatcatcctggcattggtgagcttattcctgaccgtgtcactgcccggccctgctctgcgtttcgattcacctcagcaggatctggccagcaattcaaaagagagccattattcctgcttaacaaaatgacagacagatgtggatgagcattatgacagtagcactcatgttcatttttcagtctgttttatcatctccctaaagatctagatccacagtagtcttgctgccaagtagcttgggaaaaggattaaaatacctgctgcaaa

SEQ ID NO: 94286 - DNA, 599 bp, Chicken  19866894472320_1
  misc_feature (1)..(13): n is any nucleotide
nnnnnnnnnnnnntggtggcacaggtatcagcaggacgtgtccatgggctgtatctcctgctaacgctgctccagcatgtgctcttctgatgctgcacttgggatgctgagcaccttgctccctttccgtgcatccctcatccagccaccaccaccccacagcacggccatctcctgcctcaaagagctgccccttccagccagttttcaaggagaagaggaaccatctctagaaacccattctgcacattccaaggcagaagagggatgaggacctccccttgttacctgcacggatcygcattctccctccatgccctgctctgtgctctgctcgggcagcatctgcatcctgcagaacagagcccaggttggcactgtgctgcactggagctgccaagtgggaaggcaggaaggaaggaaggaaggaaacggggagcagacagctgagtgctggaaccactgaggccagcagaaagatgggacttcagagtcacagcactgagtaaatagcagaggcacctcccagcctgagaggagcccggggcgatgaccaacagctcacagaaatgaggtgtaattagcagctaggggaacac

SEQ ID NO: 94287 - DNA, 596 bp, Chicken  19866894472330_1
aagagcccatcagaaagatttgccttcttgcttcttaattctttttattataatttttgtcatctctttcatcttttctattgtccccagttaaaagaggaaagctcaattatgtccttcagcattttattgctgctaaaagagctcgttcttcttcccttcacggaatgttgaaattgcatatggtaattctggaccttagttgcttcacaaaagcctcaggatataatgcaggagctgcacattcttaatgaattatgaacattagttgtcgttgtttgttgttgttgttttttcccyttgagatttgtgttgttacagtcactgtttgaatggttatcattttatactgcaaaaagtcaataatgttttttcctgctcccttcctrtgttatttcctttgaaagttgcatccagagccaccggtagatgtgtgagtatctgggtttaaccacagaatgttatcagatggaaataactaaaggtgttaatgagatcaaataattgtttaacttctaaagaatacatttacccctctcatctctgctactatagactgtaaaagccagtcaattattaaaactgtatttgtaaat

SEQ ID NO: 94288 - DNA, 507 bp, Chicken  19866894472330_2
gttaaaagaggaaagctcaattatgtccttcagcattttattgctgctaaaagagctcgttcttcttcccttcacggaatgttgaaattgcatatggtaattctggaccttagttgcttcacaaaagcctcaggatataatgcaggagctgcacattcttaatgaattatgaacattagttgtcgttgtttgttgttgttgttttttcccyttgagatttgtgttgttacagtcactgtttgaatggttatcattttatactgcaaaaagtcaataatgttttttcctgctcccttcctrtgttatttcctttgaaagttgcatccagagccaccggtagatgtgtgagtatctgggtttaaccacagaatgttatcagatggaaataactaaaggtgttaatgagatcaaataattgtttaacttctaaagaatacatttacccctctcatctctgctactatagactgtaaaagccagtcaattattaaaactgtatttgtaaat

SEQ ID NO: 94289 - DNA, 600 bp, Chicken  19866894472339_1
aaacagtagactgaggagagaagagaaagcagagggagaaaaaaactattctgcaaaagtaggagtagcttctgtacatttgtacattgatactacccacactaacttcttcctcaagccttctctggccatttagtaccacaacttcctgctgctagaggagattgaatgacacagagtatggacaagacacttaaatattcattagaccaaagagcataaaagtacagtataatatcttcagtaagaacacatccagggaagacctgggctgcagtttttgctcccttagggaaatcmgtattcatacatagcaaagcaatgttaaaagcagaagtaaagagatctttctcagactacacacttactgacactttacaatcactccatacttcttcacaaaccagaagaaacagtgcattgcaaactcaacaaaaacaagcaatagccatgggcagtttcttcagtttttcacttcagtgaacatagcccatctctactgcacaccttcaggctgacatgtcatgacagaaattatttaccaaatacatcctacctctgtcctgtccttgcttcaagcagtgcacctcctgggtcaga

SEQ ID NO: 94290 - DNA, 600 bp, Chicken  19866894472347_1
aggcacttcatattctgaacacatcttttactgattgtttaacctgtcccatacagaacacttctcttcccagccacctcctcccatgaatttttgtcacgggaaccacagtcttccaaagtgattcacttcctgacagccatctatttttccaagaatccatttaaactgttggctacttgttgagatacctaagagtgcaggataatttaataaacctttgaaaggtgagggaagcttgcttttttcctgtcagaggttttgactcatctgatgtggttattggagagctggaacagkaagttctggggcctttgaggagcaggttggagaggaaccttaagaggtacactatcagctttcytattttcacagatctattttaatgtctgaagagaccaacctgatcatgcagtctgatcttctgcctagcaatgaccaaagagcatcatccaatgatttctgcaccaaagcacactgaaaggcacattgtgcaggatttctgaagagctctagaattaggtagttttgggcacactggtgacttggactgtccttccatggagaaggatacacttgtgaaaatgcaagaaacccatg

SEQ ID NO: 94291 - DNA, 568 bp, Chicken  19866894472347_2
tcttcccagccacctcctcccatgaatttttgtcacgggaaccacagtcttccaaagtgattcacttcctgacagccatctatttttccaagaatccatttaaactgttggctacttgttgagatacctaagagtgcaggataatttaataaacctttgaaaggtgagggaagcttgcttttttcctgtcagaggttttgactcatctgatgtggttattggagagctggaacagkaagttctggggcctttgaggagcaggttggagaggaaccttaagaggtacactatcagctttcytattttcacagatctattttaatgtctgaagagaccaacctgatcatgcagtctgatcttctgcctagcaatgaccaaagagcatcatccaatgatttctgcaccaaagcacactgaaaggcacattgtgcaggatttctgaagagctctagaattaggtagttttgggcacactggtgacttggactgtccttccatggagaaggatacacttgtgaaaatgcaagaaacccatgttgaaacagcctgcaagagacagagaagcata

SEQ ID NO: 94292 - DNA, 528 bp, Chicken  19866894472350_1
gcctgtataatatgttttcaaacattgtatgaaatgtttgtgactgacgttaaaactatttttctctgctttaattctttgttgaagcctgtaatagcttttccaaattttatctgagatttaagtcaagataatcagttcagctgcatcagccctcctgtgtttctcacaaggattctttcattaaatgcattggctatggtgcagttacttttagcttgttctcgttttaagaaaatgtttaatgtggtactcaaatgtagaaccaaaattaatacttcttacagtcatggtagtgtraatttgataggttaagaattgtcttccagaaacctgaacaggatcatttctggattagtttggagtcatttgtttggatggttgttaaataggaaactaataatatcatattttaaaagttttatctggcagcgttagtgataagcatgttaatgaaacctcacattttgtgtgaaaaagaaattaaaaggagtcagaaataaatacaggtcggaaacaaaaaccatt

SEQ ID NO: 94293 - DNA, 600 bp, Chicken  19866894472352_1
tgatagaattgaaaagaaaaaagtacctaccctgcatgcataagtttgttttaacaagttataggaaaggaaaaatgtaactaaaaaactattccaattactgggtcagtactgtgatgtaaatagctctgaaacaaatgataagtcttacatgggcaccataaatattttctgcaatgtgtgaagttggtcactgctatattaacctgaaaagaagctgtcatgtaacagccttctgtgctgcagagggagatctgctgtggactgagaatagcatacaacaataattttatatccctygtgttcaatgagaatgtatctcagccttctccagagaaggagtttgcgtgagatgtcgtttataatgggatagagagacaacaaggaaacagaggggttcataattatttatgcataagccttttaatgctactttggcagtgtatggggtctgtaagctgttctaatggccatgaaaagcagcctggaagctggaacaagttatggtgcaaaatattcttgctgtgaatgacatctaagagccttctgctttcagtggctttgaaccagagcttccaggactcccatgggatacagcac

SEQ ID NO: 94294 - DNA, 599 bp, Chicken  19866894472356_1
  misc_feature (1)..(185): n is any nucleotide
nnnnnnnnnnnnnnnnnnnnnnnnnnnnnnnnnnnnnnnnnnnnnnnnnnnnnnnnnnnnnnnnnnnnnnnnnnnnnnnnnnnnnnnnnnnnnnnnnnnnnnnnnnnnnnnnnnnnnnnnnnnnnnnnnnnnnnnnnnnnnnnnnnnnnnnnnnnnnnnnnnnnnnnnnnnnnnnnnnnnnnnnnacacccatgagcttcaagcgggtgtcctgaggactggagaaggcaacaggatggcaaaagcaaacttggtcatactgttcaaactgaaggaccgatagtgatgggaaaaaataartaaaatttgtttttaaaatctgtatatggcctcataactccaaatgktgtcattgttttaaaaggctgaacaaaggaaatgaagatgtaggctgagaatattctgttgtgtgttagacaaagtatttttatattatggtatggattaatgcttagcaaagtagcaagctaatgatgttaactcagccttaagtataaaatggttattctgaagccctactrtctttaggaatatgatagttttctattttcacagatgaagtgaacaaattcacaacgtttctattgttctttatctat

SEQ ID NO: 94295 - DNA, 599 bp, Chicken  19866894472356_2
  misc_feature (1)..(138): n is any nucleotide
nnnnnnnnnnnnnnnnnnnnnnnnnnnnnnnnnnnnnnnnnnnnnnnnnnnnnnnnnnnnnnnnnnnnnnnnnnnnnnnnnnnnnnnnnnnnnnnnnnnnnnnnnnnnnnnnnnnnnnnnnnnnnnnnnnnnnnnnnnacacccatgagcttcaagcgggtgtcctgaggactggagaaggcaacaggatggcaaaagcaaacttggtcatactgttcaaactgaaggaccgatagtgatgggaaaaaataartaaaatttgtttttaaaatctgtatatggcctcataactccaaatgktgtcattgttttaaaaggctgaacaaaggaaatgaagatgtaggctgagaatattctgttgtgtgttagacaaagtatttttatattatggtatggattaatgcttagcaaagtagcaagctaatgatgttaactcagccttaagtataaaatggttattctgaagccctactrtctttaggaatatgatagttttctattttcacagatgaagtgaacaaattcacaacgtttctattgttctttatctatataatgaaatgatgtttatttctccgtccctatagattcagtctaag

SEQ ID NO: 94296 - DNA, 537 bp, Chicken  19866894472356_3
acacccatgagcttcaagcgggtgtcctgaggactggagaaggcaacaggatggcaaaagcaaacttggtcatactgttcaaactgaaggaccgatagtgatgggaaaaaataartaaaatttgtttttaaaatctgtatatggcctcataactccaaatgktgtcattgttttaaaaggctgaacaaaggaaatgaagatgtaggctgagaatattctgttgtgtgttagacaaagtatttttatattatggtatggattaatgcttagcaaagtagcaagctaatgatgttaactcartctttaggaatatgatagttttctattttcacagatgaagtgaacaaattcacaacgtttctattgttctttatctatataatgaaatgatgtttatttctccgtccctatagattcagtctaagttatattgaagtatggattgtagcggtgtggattaagaaatgtacaaaatattgctttgcaaaaacaagctttaaaggacagacttaataaaaaaaaaaatccacatagtat

SEQ ID NO: 94297 - DNA, 600 bp, Chicken  19866894472358_1
tccagttcactttgaataggtacaagtgtaggatggataaagcagcaaatgctggcttacttcaaaacaagtttcagacactgcgtaacttcttggcttttccagaaagctgctgggttcagcattgagttgtatgctctgactgacatttactgaaatgattcctgttgtgaatttttctgatagaaaatgtcttatgctccagtcagcttcgtaactgtaataaaactaagttttattttttcagtgctgtagctggcatttgtttttgccctttgctcctatatcctatgtgtgttmgatcaggatcaggagcacaccagatgcattaaaacaccttaaagctgtggtttgggtttctgctctttattactgctcccgctcactgttcttgctcttggatatttttaagattatgcatgtttgagcttttgctttgttttctgatgtgctaatgattccagtgtttctaacaaaaacaacagaaaattcacagtctttcttgcaaggactgaaggaggtgttttaacacagaaagcaacagtattccaaatgtttgccagttaaaatcaattgctcttgattttgagttgttctggg

SEQ ID NO: 94298 - DNA, 599 bp, Chicken  19866894472360_1
  misc_feature (1)..(179): n is any nucleotide
nnnnnnnnnnnnnnnnnnnnnnnnnnnnnnnnnnnnnnnnnnnnnnnnnnnnnnnnnnnnnnnnnnnnnnnnnnnnnnnnnnnnnnnnnnnnnnnnnnnnnnnnnnnnnnnnnnnnnnnnnnnnnnnnnnnnnnnnnnnnnnnnnnnnnnnnnnnnnnnnnnnnnnnnnnnnnnnnnnntgggctggaagaaaacctctgattggaggaaggtcaagggaaaacctgcaggatcctgcccaaggggtgcaaggggagaccagacagggagcagggagtcgtggtggctgcagaaagtggsatatggagtgtggaggagacatcagccaggttggatggagatggcttgattggcttgaccccttggggacaacaccatcctcagtgcctgaatgaagaatttcctgcccacagaatcagaaagcagctgtccctggggctggctgagctcctggcagggagatgccatcgctggcagcatggatgcccagctgttgggacagacatgcggycctcacgtggcatgcccagccacaagaaagagcaattgatgatctccaagatgtgcacaaaacagcctcagagccagcagggaaccct

SEQ ID NO: 94299 - DNA, 599 bp, Chicken  19866894472360_2
  misc_feature (1)..(125): n is any nucleotide
nnnnnnnnnnnnnnnnnnnnnnnnnnnnnnnnnnnnnnnnnnnnnnnnnnnnnnnnnnnnnnnnnnnnnnnnnnnnnnnnnnnnnnnnnnnnnnnnnnnnnnnnnnnnnnnnnnnnnnnnnnnnntgggctggaagaaaacctctgattggaggaaggtcaagggaaaacctgcaggatcctgcccaaggggtgcaaggggagaccagacagggagcagggagtcgtggtggctgcagaaagtggsatatggagtgtggaggagacatcagccaggttggatggagatggcttgattggsttgaccccttggggacaacaccatcctcagtgcctgaatgaagaatttcctgcccacagaatcagaaagcagctgtccctggggctggctgagctcctggcagggagatgccatcgctggcagcatggatgcccagctgttgggacagacatgcggycctcacgtggcatgcccagccacaagaaagagcaattgatgatctccaagatgtgcacaaaacagcctcagagccagcagggaaccctgcagaatagcaataagctaatcagctcctgctgcaccagcacccagccctgctc

SEQ ID NO: 94300 - DNA, 600 bp, Chicken  19866894472360_3
gtcaagggaaaacctgcaggatcctgcccaaggggtgcaaggggagaccagacagggagcagggagtcgtggtggctgcagaaagtggsatatggagtgtggaggagacatcagccaggttggatggagatggcttgattggcttgaccccttggggacaacaccatcctcagtgcctgaatgaagaatttcctgcccacagaatcagaaagcagctgtccctggggctggctgagctcctggcagggagatgccatcgctggcagcatggatgcccagctgttgggacagacatgcggycctcacgtggcatgcccagccacaagaaagagcaattgatgatctccaagatgtgcacaaaacagcctcagagccagcagggaaccctgcagaatagcaataagctaatcagctcctgctgcaccagcacccagccctgctcagcctgcccaggcacgtagcaagctgccttcccaacaggcaggtctgggggttaaagagacgtcactggtgatgccatcagcaggtgtgaaataatcccacagagatggtctcctccttccaaaaagcagaggcatcagttgcttgtgggctgagaaa

SEQ ID NO: 94301 - DNA, 441 bp, Chicken  19866894472360_4
gcccgggcagggacataggggcagggaggtgacatcccctggtccaccaccctggtgacactcatagaaggagggctgtgctgagcacggtggggcaccgccttccctgggccattcctatccccgcacccagagcctgggatgtcttttcttggccactttcaaaggagagaagtgctcctggcaccagggatgcgttcccattcagctcagttcatcttgcttcgcttggcacagcagagcccctctgcaactcagtttccccatctgctcacagagggagcagtgctacaaactccraaagcaccgagaaatgcagcctcagacacagccacaattagcacaggctttcagactgtgttattcctctttctttttttgcactggtagcgacactccgtgagttaaaccttacaacacgcagctgcgacgcatttactt

SEQ ID NO: 94302 - DNA, 600 bp, Chicken  19866894472361_1
tgcttacaggtcactggggtttgtcacctaccgcagcagtccacgctcatcctcacattgcaatacacgcctccccaaccctcctacctccttacccggaggaattcatccctcaccgtccttcagctttggcacaaagcgctttcagctgtaatggcttttgtgccagaatccagctgtgactttcagccatagttttctctaatgcccatctctgcctgttttgcttttggttcgttagtttcagcaaggcactgcgactgcagcactcgcaggaggacctcagcaactcagaaaaartaasagtaggcaaattctgacattgagactgatttacaagattcattttccttacaacacgccggtcttctgccagaagttgcctacaaacacactggaggggacgaatgagtggaaaatagtcctctgtatgcttagggaacagctgggacagtgcagagcagtgtacccattacagcggtagtcctcctggcacaaaaaagaggatgagcggtgtctcagcctactcacactacagcttccataccaactgacacaagcagcgtaaggcacaatcaattttcttagctaacagtttat

SEQ ID NO: 94303 - DNA, 600 bp, Chicken  19866894472361_2
tacaggtcactggggtttgtcacctaccgcagcagtccacgctcatcctcacattgcaatacacgcctccccaaccctcctacctccttacccggaggaattcatccctcaccgtccttcagctttggcacaaagcgctttcagctgtaatggcttttgtgccagaatccagctgtgactttcagccatagttttctctaatgcccatctctgcctgttttgcttttggttcgttagtttcagcaaggcactgcgactgcagcactcgcaggaggacctcagcaactcagaaaaaataasagtaggcaaattctgacattgagactgatttacaagattcattttccttacaacacgccggtcttctgccagaagttgcctacaaacacactggaggggacgaatgagtggaaaatagtcctctgtatgcttagggaacagctgggacagtgcagagcagtgtacccattacagcggtagtcctcctggcacaaaaaagaggatgagcggtgtctcagcctactcacactacagcttccataccaactgacacaagcagcgtaaggcacaatcaattttcttagctaacagtttatgcaa

SEQ ID NO: 94304 - DNA, 600 bp, Chicken  19866894472367_1
gcaaaagtctgttatcgcagcccaaggcatgcactcccactacagcactcccagtacggtaaaaacaaacatgtattgattttttatttttttttttttatgatttgcttgtacttggcaactaaaacagctcataggactcattgcaactgtttggacaacgctccaaccccatcactgagatatagagtcccatgggaagaaaaaaaaagcacacagaggccccatagcccctactctaccatttgtgtcagctgatctgacattaagaccacttgaaccctttgcacatataacttkttattatactcttaaaacaattctttcccctagcccaggccctattagaacacttaaactcagggcatttctccatccccccgcgggcgctgagaggtgaaaccaactgctctgtgaaggagcaccagggctacagctactaaaacaccactgacatgggacggtggttttctaaatttattttcatcttcgccagaagaacaagtccccaggggagcctcagctcataggaagcgggcatccaccagcaccccagcccttccaggctcatcccccgcctcccagcgggcgccgtccccc

SEQ ID NO: 94305 - DNA, 600 bp, Chicken  19866894472378_1
ggttcctgtcgcattgcaagctggtggtggagcttcctgcgctcctgtgggagggaatcatgacaaatattttctattaggaaagtggaagtaatgacatatgtcgtgtgtgtactttttgtctgagatgtgcatgactgcaaagaaacagatggctcctttaattctaatcatgggcatgtggctccgccgtttatgaggcttttattcctgcatagatatatttgtttaattctttttaagaggaaaggaagaaaaattgctttacatcaactcattacaaattaccaggaacaatgyggattattaggaaatctgcatccagtgaactacgaatttgttgcctggagcagaccttaaaagmaaagcagtcatgtcttatttcctgtggagtcagcatgtctgggagtggttagatggagagaaggtagaagtctgttggccaaggtaggagatgcagggctctttctttgctggatcgctaaagcccctgcgtcctttgtcccccatggtcgtgctctcctttggcttgtgcccgcaggtctctgcctgtgttattccctcacagcccggttatttccttaactatgagccaccaca

SEQ ID NO: 94306 - DNA, 600 bp, Chicken  19866894472378_2
aaatattttctattaggaaagtggaagtaatgacatatgtcgtgtgtgtactttttgtctgagatgtgcatgactgcaaagaaacagatggctcctttaattctaatcatgggcatgtggctccgccgtttatgaggcttttattcctgcatagatatatttgtttaattctttttaagaggaaaggaagaaaaattgctttacatcaactcattacaaattaccaggaacaatgyggattattaggaaatctgcatccagtgaactacgaatttgttgcctggagcagaccttaaaagmaaagcagtcatgtcttatttcctgtggagtcagcatgtctgggagtggttagatggagagaaggtagaagtctgttggccaaggtaggagatgcagggctctttctttgctggatcgctaaagcccctgcgtcctttgtcccccatggtcgtgctctcctttggcttgtgcccgcaggtctctgcctgtgttattccctcacagcccggttatttccttaactatgagccaccacaagctgtgtgctggaaccggtctttccccaggggccatgttggccccttttctttgtattccata

SEQ ID NO: 94307 - DNA, 600 bp, Chicken  19866894472388_1
tttcaaccaacaactgcacgctcacagcaaactcagtggcagcacttacaggtggtgctcataacgatgcccacctgacccagaagaacagccaggcaaggcagagggagcctcccaagctctgctttccctcctgtgtgctccaagctctcccagagcagggaatgaggccaccttcccttctacctccattcccaggaggaaggagagctgggaacaaaacccacctggcagggggccacccatcccgctgggtgacaggtcccttctcctgagcacattgttctaattaacctagayttgtggagacattctacagcagagatcactttgaggctgaagtcctggtgctgccgaagccactcatggtgcttgaactcatgttgacaccaactgagcaacagctttattgatcatactgtatctattaagctttgcatattaatcacacacacataactaaacgtaagcaggatgcttaccatgtactcctctggattaaagtactggcagcagctaacaaggggttgcatacatactttgctagtaccagcaccgtgatgcctgggttcctactgctgaactgcattaacaattaat

SEQ ID NO: 94308 - DNA, 600 bp, Chicken  19866894472410_1
ttttattccatgtggtgttcttacgtgaattttttagttgttatttttcagagttcttcatatagcttcttcttgtaaagttatatgtatctagactatgaattattttaatgtttgaaaattaagcgtactcatagtcttctcttaaaagactctaattccagtggaaataaacagaaactaaggtatccagcatcagattaggaataatcctactttttttccaggaatagagtgctatcagtttttccattagaagagtaatttctcaggtttttctttaaatttttaacacgccascaggatataaggaaacctttgctctcttgcctgctcatcctatcccaaatgctcattttaaaacagtcttcaagtaattaaattctgtgcttctctgcaagtcctttacagctattacaatgtagttatcaacaattccatccatctggcacaaaaatttcactgacttcaacaaaacatggtaggacttcaagcaagtcccatgaggagggactttgaaataaagttgaaaatatttcatgattacttcttaaaagagtgttctgttttattttcctagtgacccatagctattgttat

SEQ ID NO: 94309 - DNA, 599 bp, Chicken  19866894472417_1
  misc_feature (1)..(56): n is any nucleotide
nnnnnnnnnnnnnnnnnnnnnnnnnnnnnnnnnnnnnnnnnnnnnnnnnnnnnnnnatctcagggcagctttgcttcaagcactgtgcagtatctgcattattcagtcattgcctcttcagagctaaacacccgacctgttgtagctgttctgtaccatcttctttacaaagaaattactgaatgacacattttgaagggggaacatcaggttgggtataaggtaaaggttctgcaccagagggtgctgagcatggaacaggcttctcagggcagcaggcacagccccgagttgctggarctcaagaagcatttagacagtgctctcagacataggggttgggtttgggtggtgctgtgyggagccaggagttgaactcagtgatccttgtgtgtcccttctaactcaggattatctatgattctgtgataaccatgtgacgttttatttacttttaatgttatgagatatgatcaagttatcacatttgcatttcctagccagttcagatatgatttctatgcctaatctaccagctgagcaggggatatgctgatgcaggggcagctgcgtaatccacatctccatgtgaccagagt

SEQ ID NO: 94310 - DNA, 590 bp, Chicken  19866894472417_2
atctcagggcagctttgcttcaagcactgtgcagtatctgcattattcagtcattgcctcttcagagctaaacacccgacctgttgtagctgttctgtaccatcttctttacaaagaaattactgaatgacacattttgaagggggaacatcaggttgggtataaggtaaaggttctgcaccagagggtgctgagcatggaacaggcttctcagggcagcaggcacagccccgagttgctggarctcaagaagcatttagacagtgctctcagacataggggttgggtttgggtggtgcyggagccaggagttgaactcagtgatccttgtgtgtcccttctaactcaggattatctatgattctgtgataaccatgtgacgttttatttacttttaatgttatgagatatgatcaagttatcacatttgcatttcctagccagttcagatatgatttctatgcctaatctaccagctgagcaggggatatgctgatgcaggggcagctgcgtaatccacatctccatgtgaccagagttaccaggcagcccctggagctcagctgcatgccatgctcagacctgtctga

SEQ ID NO: 94311 - DNA, 600 bp, Chicken  19866894472428_1
tgtaaccatgtccatggacagaaaataagggttggtttgctgagacagatcgggcaggcatcctacagacatggctagcatttgactcgtctgtgttgactagtccacagtcttcctacagtccctgatagtgctgtagtctcaccttctcacttccagcagagacctgaatttgtgccttttcctgacaagtccttgtcccaggcaggcagaataagctatttccactagatgctgagatttcctgaatgtagtgagtgcatcacaaaagtaagatgtcagtaattattatagtcaatraagtttaaagaatactcagttaggtctattggaggctttcagtatacttcaatttctctaataccacagaaggaatgcaaatgcttccagtggaagcaatcacattgcaatatttttagatctatgtagtcctttggctgttttagcttattaagatcacgtcaggtttggccctaaatctttagggttataaataattctcaggtcaagacgattttttctcttttcctagtgaatgaccttcagatttgaatgaattgaaggacagttacacagcaggagaagggaacattgcattgt

SEQ ID NO: 94312 - DNA, 600 bp, Chicken  19866894472429_1
gaacaccccatctttctttaagttacgggcttggggaggggctgggccacaaaaaggcctaattcccactggatctgtactgtgctgctaagggctgatcacctcctgaaaatacaggcgccacaatgagagcagggtgcttggaaagacctggcgcagactccagctctgggctggatttagcacagattttaagcacaaactccaagcaatgcggctggaaaggttttggatgaaacagcttctaaaggaaggaggaagagttcaagtctcagcttcttcattgtttttggagacagrtgtggatggaggcagttcttgaaaactgaatcagtctctttcttcagagggaaacctgggctgtcctaatggcacaattcagtgatggtgccctctgcaatgttagtcaaaacaaggaacagtaatcgtacagaaaaaatgtgactgatgaaagaccacaagatactgaaccttggtattatttatcagggaagcaaaatgagttctttgttttaaaatatttatcatgctgctttggataacttgcattattttcatcttccttgaatctttttatgttcactgctatgatacctactg

SEQ ID NO: 94313 - DNA, 600 bp, Chicken  19866894472437_1
gaagaggaggtgcccaaagcaaggcaacctgcccaccattctggagtttggagaagggcaggtcagcgatttggagaaccaggacggcctggccgagagccaggaggacctgcggggtgaaaagggtgagggaaccccattgggcaaggcagagggcaggacagtggaggagcaaggcgccgggatgccacagacgtgacgttggctccacgttgggtacatctgggggacaaacccaaggtctccttatcagaggtcctggtaagggtggatgcaggcggtgggatgctctgggagcaygttgccttcttcccctgtgataaatatcaatgctgctcccgtcaygcagagatgggatggtgttgtatacttgtatctcattccctgttcatcgcggggcagttggactcaatggccctgctgggtcccttccaactccagtgattctatggaaagccaggaaggtgtttttaaatggtagcgctgtgctttttaacctctccaaatacgaatcgccaaagcactggaacatgaggccttcagaagcacaaaggggagcaggaaggcgaccagatccagcaggatcccagctggtcaccc

SEQ ID NO: 94314 - DNA, 600 bp, Chicken  19866894472437_2
gtttggagaagggcaggtcagcgatttggagaaccaggacggcctggccgagagccaggaggacctgcggggtgaaaagggtgagggaaccccattgggcaaggcagagggcaggacagtggaggagcaaggcgccgggatgccacagacgtgacgttggctccacgttgggtacatctgggggacaaacccaaggtctccttatcagaggtcctggtaagggtggatgcaggcggtgggatgctctgggagcaygttgccttcttcccctgtgataaatatcaatgctgctcccgtcaygcagagatgggatggtgttgtatacttgtatctcattccctgttcatcgcggggcagttggactcaatggccctgctgggtcccttccaactccagtgattctatggaaagccaggaaggtgtttttaaatggtagcgctgtgctttttaacctctccaaatacgaatcgccaaagcactggaacatgaggccttcagaagcacaaaggggagcaggaaggcgaccagatccagcaggatcccagctggtcacccccacacgacagatggacagacttcacccaccaacactgcacagaa

SEQ ID NO: 94315 - DNA, 600 bp, Chicken  19866894472437_3
cagatccagcaggatcccagctggtcacccccacacgacagatggacagacttcacccaccaacactgcacagaactgcaaccctttcccataccgacttcaggagctgctgaatagcgtgcctggtgagatcaacacaaagcctgatcctgccccaagggaacccactccaagcagggtgttcccactcccagccccacagcagagctttgctttccttgtgctggcacagagctgggtgccagtgcgttcatcacctgggtgttgctccccagccttactaagcccaggctggccccrctgcctgcccagtgctcacccagccctaaaatccagtttctcacctgcagagccgctgtgatgaccccagggcttcccrttcttgcaccagagccctcggtgcgttttggggagcaaaatgtagtgtctgaagctggggctcagctcaggctcattgctgttgctgacaaaggagaccacaatactgaaggtttatacaagaaaaagaacaaaccttggggttcacccctctcactgccattcaggctgggtggacacggccaggtctgaagcacacaaaggctttcaggtcacttggct

SEQ ID NO: 94316 - DNA, 600 bp, Chicken  19866894472437_4
aaccctttcccataccgacttcaggagctgctgaatagcgtgcctggtgagatcaacacaaagcctgatcctgccccaagggaacccactccaagcagggtgttcccactcccagccccacagcagagctttgctttccttgtgctggcacagagctgggtgccagtgcgttcatcacctgggtgttgctccccagccttactaagcccaggctggccccrctgcctgcccagtgctcacccagccctaaaatccagtttctcacctgcagagccgctgtgatgaccccagggcttcccrttcttgcaccagagccctcggtgcgttttggggagcaaaatgtagtgtctgaagctggggctcagctcaggctcattgctgttgctgacaaaggagaccacaatactgaaggtttatacaagaaaaagaacaaaccttggggttcacccctctcactgccattcaggctgggtggacacggccaggtctgaagcacacaaaggctttcaggtcacttggctacgtccttctccccagtccagaagtgctttgtttgtgcaatgccgttttggttcggggcttgtttttgttttattttat

SEQ ID NO: 94317 - DNA, 600 bp, Chicken  19866894472445_1
taccctaggtgttaataatgttaatttttaatactgtaggcaaaataaataatttccttgattctaaataacagtgtaatttaaattcagatctaaatagtatgctagccaaagactccaaatgtgtaaatctcattaggcctgttgccaggcagagagctctccaaagccagcaaactttcctttggacttgggtgggctgtaagataacctggcctggcctaggcccctggggctgctccacagcagggagcggggccatgctgactgagtctgcaggctaaacctgtaatctggaarcttgtagttcaaataatccaacagttattcagataatgcagcatcattgtgtgtaagctctttaataccaccatcttgcatcctgcggrggctggtgtgtgtggagggctgggctctgmgaagcctgtcagccagccaccaagtgctctggaagctgttgggggtcggcctgtgctccaaagggctgtacgtcaagagataggttttcaagagaattaggttggaatgatttgtcagcacttgtgatgtttcacagctcagaaatgcagttccatacagagagggtattattaaccagcg

SEQ ID NO: 94318 - DNA, 600 bp, Chicken  19866894472445_2
gatctaaatagtatgctagccaaagactccaaatgtgtaaatctcattaggcctgttgccaggcagagagctctccaaagccagcaaactttcctttggacttgggtgggctgtaagataacctggcctggcctaggcccctggggctgctccacagcagggagcggggccatgctgactgagtctgcaggctaaacctgtaatctggaarcttgtagttcaaataatccaacagttattcagataatgcagcatcattgtgtgtaagctctttaataccaccatcttgcatcctgcggrggctggtgtgtgtggagggctgggctctgmgaagcctgtcagccagccaccaagtgctctggaagctgttgggggtcggcctgtgctccaaagggctgtacgtcaagagataggttttcaagagaattaggttggaatgatttgtcagcacttgtgatgtttcacagctcagaaatgcagttccatacagagagggtattattaaccagcgcgcaacttctgcaggatgtcatgaatcacaggttactggacatcctcctgaaagactccataaattctgaatcacttttaaaacaaaca

SEQ ID NO: 94319 - DNA, 600 bp, Chicken  19866894472445_3
aaatgtgtaaatctcattaggcctgttgccaggcagagagctctccaaagccagcaaactttcctttggacttgggtgggctgtaagataacctggcctggcctaggcccctggggctgctccacagcagggagcggggccatgctgactgagtctgcaggctaaacctgtaatctggaarcttgtagttcaaataatccaacagttattcagataatgcagcatcattgtgtgtaagctctttaataccaccatcttgcatcctgcggrggctggtgtgtgtggagggctgggctctgmgaagcctgtcagccagccaccaagtgctctggaagctgttgggggtcggcctgtgctccaaagggctgtacgtcaagagataggttttcaagagaattaggttggaatgatttgtcagcacttgtgatgtttcacagctcagaaatgcagttccatacagagagggtattattaaccagcgcgcaacttctgcaggatgtcatgaatcacaggttactggacatcctcctgaaagactccataaattctgaatcacttttaaaacaaacactacacaatggcaagcaaggccaagcagat

SEQ ID NO: 94320 - DNA, 600 bp, Chicken  19866894472452_1
tcatttgtgttagttcaacacttaacaaacccccatgaaatgttgccctgctctgtgacgggctctgcaaataccttataaatcccagtctgggaggagacaggcacagacagacaggctggcagacaggaaatattttcattcccaattttcagatgagcagctgaggctaaagaaatcagtcctgtcctgatgtcctgtaagtctggctgtaacaagtgagggtggcccaggcctgaggtcacagaatatggctgtagaaaaggcaagagttaacctcgactttccagagtttcttgktggtttgtctgtgattctagctttgctagatcacacctgctagaaagtacacccctccctgcaaatattcagtgtaaggttttaattctcattcttaacattaactgattttgacaggctttcaaggacttcattgcagcttctaggaaagtcgattttgatattagcagcttactgtatactacctactgtattctctttcctttgatggcttcccttaatagagatttatcaagctatgggttctcataaacrttttgcttttttgcataaagcaaaaggcagtccttgaaactgctt

SEQ ID NO: 94321 - DNA, 600 bp, Chicken  19866894472452_2
tgtagaaaaggcaagagttaacctcgactttccagagtttcttgktggtttgtctgtgattctagctttgctagatcacacctgctagaaagtacacccctccctgcaaatattcagtgtaaggttttaattctcattcttaacattaactgattttgacaggctttcaaggacttcattgcagcttctaggaaagtcgattttgatattagcagcttactgtatactacctactgtattctctttcctttgatggcttcccttaatagagatttatcaagctatgggttctcataaacrttttgcttttttgcataaagcaaaaggcagtccttgaaactgctttatgcctttaccccgtctacctgttctgctgtaatatttatcagcagcagctccaggtagaatagaatgctgatagcttaagctgtcaagctgtcagctggtattgaaagaaatatcttaacatagtaactcgcttagaaataggttgatatatttccattcttaggcacttgttatgctgaattcaaagagaatgtactatgccttgtcccagttttgagggaaaaatctgctgaagttagtatattccttata

SEQ ID NO: 94322 - DNA, 599 bp, Chicken  19866894472460_1
  misc_feature (1)..(63): n is any nucleotide
nnnnnnnnnnnnnnnnnnnnnnnnnnnnnnnnnnnnnnnnnnnnnnnnnnnnnnnnnnnnnnncctgcagctttacgatgacaattgggatgtttagagttctatttggagattattacttgtttataaaatgttattcagaaggcctaatttatgtacaggaattgcaggatttaaacatggaccatgtgaatgtggagagacgagagattctagacatgtctctcctgaacttcacatgtatttggaaaaaatactttatccaattaaaccagactcccacagttcccatgatctctmccaaggtaccagtgagcaaaccgtattaaatagaggccactttttgccatgttcccttattttttgcagggtcttttaagtgaatcacttgtgacaaaccaacaaggcttctcacagcctcatcacaggtgactgaagtgaatgtattttatttcaaaatgggcagaaaccatgacaccatcattgggtatgtgaatctttctgctgtctggtaccactggttttggacttgctgaaccacactttatggtattagtcaatgggactaaggaaatccaaatccatgcagccacaggaag

SEQ ID NO: 94323 - DNA, 600 bp, Chicken  19866894472460_2
ccactttttgccatgttcccttattttttgcagggtcttttaagtgaatcacttgtgacaaaccaacaaggcttctcacagcctcatcacaggtgactgaagtgaatgtattttatttcaaaatgggcagaaaccatgacaccatcattgggtatgtgaatctttctgctgtctggtaccactggttttggacttgctgaaccacactttatggtattagtcaatgggactaaggaaatccaaatccatgcagccacaggaagtttttccattacggatgacgttacgttattaatttaytcaagtcaatgcctggcattacagatgtttgtgcatctcattttcactgtagagctcttgcagagcaattcatagcataaagccaaacctaaaaaagccattttggccacgaccctctgctggcaccagctgacacagcctcaactgcaacygtgcaatgtaaaagcaggctgttttgttttgcacagcatcaagtgtggtacacagcttgggtgtaatcctgtcagaatgccgccrtttattctggagtaatgtaagaagctgttcacttctgggatgaaactactccaacgtgccgaa

SEQ ID NO: 94324 - DNA, 600 bp, Chicken  19866894472460_3
tatgtgaatctttctgctgtctggtaccactggttttggacttgctgaaccacactttatggtattagtcaatgggactaaggaaatccaaatccatgcagccacaggaagtttttccattacggatgacgttacgttattaatttaytcaagtcaatgcctggcattacagatgtttgtgcatctcattttcactgtagagctcttgcagagcaattcatagcataaagccaaacctaaaaaagccattttggccacgaccctctgctggcaccagctgacacagcctcaactgcaacygtgcaatgtaaaagcaggctgttttgttttgcacagcatcaagtgtggtacacagcttgggtgtaatcctgtcagaatgccgccrtttattctggagtaatgtaagaagctgttcacttctgggatgaaactactccaacgtgccgaataaaaagcaatgaaaacatgatatggctttcagtgcttccagcacaatcctaggattgtttgcttgttttttcagagaacagtaatagagcaaatcatgtaaaatagactccaggacagtctgtattactgctatgaaacctgcctctttta

SEQ ID NO: 94325 - DNA, 573 bp, Chicken  19866894472460_4
atccaaatccatgcagccacaggaagtttttccattacggatgacgttacgttattaatttaytcaagtcaatgcctggcattacagatgtttgtgcatctcattttcactgtagagctcttgcagagcaattcatagcataaagccaaacctaaaaaagccattttggccacgaccctctgctggcaccagctgacacagcctcaactgcaacygtgcaatgtaaaagcaggctgttttgttttgcacagcatcaagtgtggtacacagcttgggtgtaatcctgtcagaatgccgccrtttattctggagtaatgtaagaagctgttcacttctgggatgaaactactccaacgtgccgaataaaaagcaatgaaaacatgatatggctttcagtgcttccagcacaatcctaggattgtttgcttgttttttcagagaacagtaatagagcaaatcatgtaaaatagactccaggacagtctgtattactgctatgaaacctgcctcttttataacaacaacaaaaaatccaccatgcagatatatgatgttcaaaaacaacttttttca

SEQ ID NO: 94326 - DNA, 528 bp, Chicken  19866894472471_1
aaatctcatgcacagttgccaagagctctgagaccgaagcaagcagtgcccgtgtccccaggctggggtgacaccagggctgtgccttggctgcgcccacctgcacaatgggtgctgtgcagcagctgtaaccccagcccagtgctcactgctgggatgtgaactgtgtcagctgcacaacttgaacccagctgggctcacgatcccattttcttttgggtggtacttatgtaaatgtgccaaaagcagctgcagcaccgagtccttgctgctgaacctctgcctgcatccggcactcaycccctccttgaatttaatatatatttttaaaagcacttagcatttcctctctcacagtaagtggctttggtggaagggcatttgagctgcctctgacagtgatgaaaggggattacaactccagctgacagcaatttggtgtggccgtactcagtttccctcttgtggtttctgcaggaattaactggaaggatatttaactaattgccttcccagctgaatatgtcc

SEQ ID NO: 94327 - DNA, 600 bp, Chicken  19866894472475_1
tctgtcgggaaggaaattgggctaaaagagaaatccaactctgatctgagatcagagttggtttggtgttcacccgactctcagcctctgagctttgtatcttcccaaataacttcatttcagcagctgtgaaagcttatatagtgattcggaatataacgtaggaatattttctcctgaagattgtcctgtgttgtgcagaactctgaatctcccatccctaggctgtctttaatacagcattactaacgggaaatactcaaagtaaccttcactatgcaagttgattttaaagacaartataaagagtgaggaggaggtgacaatacatacttgagtgcataactgtgtgaaaactaaaagccaccctcccacctcttattcccaaagtgttatacaaatgtcttgcactgtaagctccttggagaggaaaatgcttttgttttgtttcatcttgtgctgaatagtgcataaataactcctgcagtctctaacagatgtgacattgggtttgacaaactgcgcattgaatcagcagcagaagcaagggcatctgtccccagaatgaacttgctgaactgctgctctgctcttactgct

SEQ ID NO: 94328 - DNA, 600 bp, Chicken  19866894472480_1
aatagcaactagcaagcaagttcgtgcatttcagaaagacaaaatattctcccatcagaaaaggagatcacaaacgttaaaaagactgacctaaggagaattgagcttttaattaaaaaagccaggtttagccaacaataaacttgcctttaggataccctcagaggagataaacagggagagagaaagggagtgcctccagctagcttgtcattagcacaaaggaaaacaattgcagggcttagggaggatttagctataacaagtgcttatcacagagtaatgtcattgcacactatygttctgtattcagaatgaaattaatttccaactctatattaaccttttagagaccctgcttgatagaggaataaaatcctttggattttgctacatcaccagaaaaggccattttgagatttggtgaattggacagcctgtttcctgtagaacactatgaaagtgaaaaacaaatatatagaaaatctgtttccttctataatggacagcaggtatttcagagcattgaaaattcgagtgtccagaagcaaatcaataaaacaaaggggaaaatctcaagtttattgttttatttccacg

SEQ ID NO: 94329 - DNA, 599 bp, Chicken  19866894472485_1
  misc_feature (1)..(98): n is any nucleotide
nnnnnnnnnnnnnnnnnnnnnnnnnnnnnnnnnnnnnnnnnnnnnnnnnnnnnnnnnnnnnnnnnnnnnnnnnnnnnnnnnnnnnnnnnnnnnnnnnntcctcgccggtcggcgctcacatgactcagaggaagcgcggctgtaaacaaacgcaggcgaggagccattaaccacgagccattaccgtgttcccactcacttttggtgcaacggtcagatcgttccctctgcaaaatggccgctgggcacggctcgctcggggagccccgccggggagctgctgcctcccaccgcctccgytgtgctgtccgcggtcgcacggcgctcctccgggggcacaacggcaggggaggctgcggggcgatggcaccgtcggcgacgcctgggtcgcctctcccactcgctgccccgtggctcccgtctgacyggggagccgttgaggcgtctgcggaacgccgggccgatccgcggctcgggtagaaggatatgaattggctttgttatgccgtgattgcccccccggggccgctcgggaggaataagaagacgtcagctttaaaaaatagctcggttctgcctttctgctgctgctgctgctg

SEQ ID NO: 94330 - DNA, 600 bp, Chicken  19866894472485_2
gaggaagcgcggctgtaaacaaacgcaggcgaggagccattaaccacgagccattaccgtgttcccactcacttttggtgcaacggtcagatcgttccctctgcaaaatggccgctgggcacggctcgctcggggagccccgccggggagctgctgcctcccaccgcctccgytgtgctgtccgcggtcgcacggcgctcctccgggggcacaacggcaggggaggctgcggggcgatggcaccgtcggcgacgcctgggtcgcctctcccactcgctgccccgtggctcccgtctgacyggggagccgttgaggcgtctgcggaacgccgggccgatccgcggctcgggtagaaggatatgaattggctttgttatgccgtgattgcccccccggggccgctcgggaggaataagaagacgtcagctttaaaaaatagctcggttctgcctttctgctgctgctgctgctgctgctgagcgtggtgtgtgtgctcaggggagtgaggttgcgtgaggggagcgggtggaggagcaggtgtttggctctgctgtggccgtggttggatttccacttcctctcctgccatacttaaggctt

SEQ ID NO: 94331 - DNA, 600 bp, Chicken  19866894472487_1
tgtgatggggaacgggaataaaatgattctcacactttactactgtgtttactcacaatttactctgcattttactcacactttactctgggtttaactcatactttactcaagctttattcttaattttctccatgtgaactcacactgtgcaatgaaggtactcagagtctagtctgggtgtactcacaccttttatttgggttttactcacacttatttcaggttacctacactttactctgggtttactgacaccttactcctgcttcactctgacttttctacgggttttactcmcactctactctgggtatattcacattctagaccagttgtagtcacactctactctgggttttactcacactttactgaaggtttacttaaatatcacaccaggtttactaacactttatgtttactcatgctttactccaggtttactcatgctttacttcaaatttacaaatacttggtggagtgtttactcacactttactcaggatgtactcacaacacactccaagtttactcacattttcctctggatcactcatacttcactctgtcttttactcacccaggatattcatacag

SEQ ID NO: 94332 - DNA, 600 bp, Chicken  19866894472488_1
gtaagtggactatgaacatccaatacagagaaaaattggtcattccagttctctgctcgaaggagagctagcttcaaatgtacatcagttagtttatgaagcattaaaatcaagtgcttcttacctttacaggaacttacatggattttgaggcagatattatgccaagatccaagtaacagtgtgcattatactgtattaatggattatgtcgtaatagacaacatctttatccccgtcttttgcacctataggcaaagttacagtctaattactgtgagactttcgtttgttacattmtgctattttttttcttgtctttccattgactcagcttgtatgaagtacgttttcctgtagattcactctaattctactgtaatttgatttggccaaagaggctatctttagtcattgtattccttctaaaaaacttgctttgtgctgtatctatgcttttctggttttgtaatgaaacgtatcaaaagcagttacagtagtttagaggcacttattttctaactatttcaggcagccatttttctattgttgtatttcttcatgaactttcaacagcccctttttttttctctatgattg

SEQ ID NO: 94333 - DNA, 600 bp, Chicken  19866894472508_1
accagagctccagtgatacatttacagaaagcgcggaagggagcatcttgtttgtttatgcctttatttcttgtaggttagggtaatgggttaggaaaagggatgagcgagggacaggagcgctgttatttctgagactcgtatttggtcgccttcacgctgcgggaggcacagagcgaagtgctcttacggttacgaggaggagcttcgggaaaaggagatgatgagtaagtggaactcatgcttcgggcttatgacagatagagaggagctgcggggaccggccagagccatcgcgcrggaggagcggcagcgggaggagcagtcagagaggagcagtcagagcccccagacgtgcctctcccgggcagtaaggcaggtgctgttggacaacaggagcagcggtgaggcgggggttgtcttaggaggagggctgggaggatgctcagccgtgaaaagagcgggtgctcgttttgccagagttataaaagctgtagtgtggcggagttgttttttggtttagtatttgtgacagtgtcayctatgtagggggtttctatcagtgttaatgatgctagctttacagatgagactgttcta

SEQ ID NO: 94334 - DNA, 600 bp, Chicken  19866894472508_2
tgcttcgggcttatgacagatagagaggagctgcggggaccggccagagccatcgcgcrggaggagcggcagcgggaggagcagtcagagaggagcagtcagagcccccagacgtgcctctcccgggcagtaaggcaggtgctgttggacaacaggagcagcggtgaggcgggggttgtcttaggaggagggctgggaggatgctcagccgtgaaaagagcgggtgctcgttttgccagagttataaaagctgtagtgtggcggagttgttttttggtttagtatttgtgacagtgtcayctatgtagggggtttctatcagtgttaatgatgctagctttacagatgagactgttctaatgcatttatagcaaattgttttaaaatataattctaggtccaagcatacatggctcctggtgtctcgaatgagaagaaaagggaagatgaasagtcttcaaggtgagattgagaaatttcttttcatgtccaagttcactctaaccttccttcccaaactccaaaattcattacacagctgtttaatttaagatcaagtatattatagaaatattgacagtaacatcaggtatctacaga

SEQ ID NO: 94335 - DNA, 600 bp, Chicken  19866894472508_3
caggagcagcggtgaggcgggggttgtcttaggaggagggctgggaggatgctcagccgtgaaaagagcgggtgctcgttttgccagagttataaaagctgtagtgtggcggagttgttttttggtttagtatttgtgacagtgtcayctatgtagggggtttctatcagtgttaatgatgctagctttacagatgagactgttctaatgcatttatagcaaattgttttaaaatataattctaggtccaagcatacatggctcctggtgtctcgaatgagaagaaaagggaagatgaasagtcttcaaggtgagattgagaaatttcttttcatgtccaagttcactctaaccttccttcccaaactccaaaattcattacacagctgtttaatttaagatcaagtatattatagaaatattgacagtaacatcaggtatctacagagagagcttttctggaaaaccgttttcatttatcatggcaatgaattttccaggcataggtgatgctatgatggcttttcatccggtgagctgttgaaatgctgactttggtcactgcctgtagcttgacctgcagcctgaagagatagaaca

SEQ ID NO: 94336 - DNA, 600 bp, Chicken  19866894472523_1
acaccaggaatgcagtaacctgcctcacctgccattgctgtgtgaagccaggtccctcccagtatgagacagggctacagcctgtggcagtacctgaagctaacaggatcctgttgttcctaagtcagcagcatctcataaaactaaggttcaatttgcatcttactcgaagtctgagaaatgaacagttaaacactaccagttctttccatgaaaggagagcagtcacaattctcgcagcctgcactatgagtagcacgactctataatacagggaagtacaatatatgtggaacgtcytcttatttaagtttcaagcttctgtgtgataccgaaaaattttaagcatttttcagcatcgaaaagaaaatcataactggtgacagtacaccataagaagctccttctgaacatgcttcctctcctcagtatttttccaagagaaaagcaagtgggagtgggaagagaaggaaaaagagaaactggcacatacttcattgacagttgttcagaacttacagctcagggtgttcaaaaacaagtatagatactagaatgactctatcaactctaagttactctggtaggtacaaccacaaa

SEQ ID NO: 94337 - DNA, 600 bp, Chicken  19866894472526_1
gttctgtaatgtaggccaaccatataatgagaaccacactacttgtagcaacatactgatttaatccagattctcagatgaaattttgcaggattagctttactgtgcattgtgaagtgtagaaaagacagcagcagaccaaagcagattgatagacaaagcaaaccagaacctatcttttcctttcaagttacgctaatttcatctgttcattatttacaatgcattggattgattttcttttaagaagttttaccaggctttggtccatgggtttctgtagagtctcatctgatttaycccagtgctgatggaagaaagattaagttgcatagctctcatgagacatctagtcataagatgtaataataaagactaatggatgcattgctttatggcagttactgtgtcaccaagcaagggctttgagtcaactcaacatgtgctgttgtgaggaaaaaaatgtatcttgaccaagctactcttgaaaaggaatataactgctgcataaatctccaattgctgaggaaaaaaaaaaaaaggcaggaatagcaggaatagaatctgcagatatcttgtcgcagcaaattactgtgggta

SEQ ID NO: 94338 - DNA, 600 bp, Chicken  19866894472531_1
tccagagatactagtttgcccctgatgtttacaactttaaaagtgtaaaaatcagtctctttctgctgagtagcggaaaatgctaagagcaggagtgctgtaattgcaaggagcatggctagaggaatgagaaaaactttagggaaggaagaggaaggcttgtgctccacactgccctcaggatctagcatgctgcacgacccagctgcaaacacttgccacaaaagcaaagccctgccggaaagaagagactgctgcaaacgaagcttttgcaacagtctggatcttgcaaaagagcayaggaccataaaatccttaaggttggaaagcacggctaagatcatctaatccaaccataatttagcagaatctgtgtctatgcatgacctcatgggcaggtatttatggagcagccaaatactaaaagaatatatccttgcagtagtggtgtgtcaagtgaggccctttaagggtccaacctgaattgaagtgctagttctttggccccaaaatagcaaggttgtatgcttctatggaatgccagatgtacagatttgctttaactatgtcctaggaaaataagggagtcctgtgattttt

SEQ ID NO: 94339 - DNA, 599 bp, Chicken  19866894472545_1
  misc_feature (1)..(84): n is any nucleotide
nnnnnnnnnnnnnnnnnnnnnnnnnnnnnnnnnnnnnnnnnnnnnnnnnnnnnnnnnnnnnnnnnnnnnnnnnnnnnnnnnnnncactcttagatgattcatatgataatatctacgggatgccaaatgatatgctggttgttgaaaattatagaaccatactatcatagaatggtgtgggttggcagggaccgcaaattacacccagttccaacccctaccacaggcagagctgctacccctcagctcagcttcccagggccctgtccaacctggccttgagtatgtccagagatgggrcacccacagcttctctggacagcctgtgccagtgcctcaccaccctgagagtaaaaaaattcctcctaatatctaccctaaatctcccctcttttagtttaaagccatttccccaataccagattttcctaaggaacttgttttayaaatctaaggttaaccattgtatttataaataaatgagtatgatctcattgaacgagatccaggctcctaaatctaagccaaggtaggattaggttcagattcattgataatttcttctgaaaacttcatgcttgcttacacagaatccaggt

SEQ ID NO: 94340 - DNA, 600 bp, Chicken  19866894472545_2
aattatagaaccatactatcatagaatggtgtgggttggcagggaccgcaaattacacccagttccaacccctaccacaggcagagctgctacccctcagctcagcttcccagggccctgtccaacctggccttgagtatgtccagagatgggrcacccacagcttctctggacagcctgtgccagtgcctcaccaccctgagagtaaaaaaattcctcctaatatctaccctaaatctcccctcttttagtttaaagccatttccccaataccagattttcctaaggaacttgttttayaaatctaaggttaaccattgtatttataaataaatgagtatgatctcattgaacgagatccaggctcctaaatctaagccaaggtaggattaggttcagattcattgataatttcttctgaaaacttcatgcttgcttacacagaatccaggtgaaaagagaaaaagaattgaaaactaggttgaaattattgagaacagtgatgtgaataacaaggtttcattatcagagaaggacgattcacgctgcagatttatttctccaatgtaaccagtttatttaagtatttattcttcctat

SEQ ID NO: 94341 - DNA, 600 bp, Chicken  19866894472552_1
caagacttacttgttttgcccatgttacaattcccttctatctgcagtctggaaatgtgacagtagaggttacactgaattacagtgacatctctactcatgcaatccatcttgccctgtgcagatcacaacagtctcaaatgcttccagcccggcatcttcacctgcaaaagctctaacccagcacacctgcgtgaagtgcatcagcctctgctggaaaatggaagctcttccaagtaagaaatgaaagagactcagatctttgatctgcagtatgcaactaccaccagtacttgaatwcagactgacatctgaataaaasaaasctctttcttctgtaagaaaaagtataaatacaataaatcctgtcactgttacctgaaaaaaaactgaatattgagaattaagcaactctgggaatgaattttaacattcaaaaattacttccctgctagtgcttgaatatataacttctttttagtaccaaaaatactggcaacatgaactcctaatacaggagtactttctactctaattgaaaggaatacacactaacctactgtcaaaagccttccacatccagtgaacagttcaacccac

SEQ ID NO: 94342 - DNA, 600 bp, Chicken  19866894472552_2
tgttacaattcccttctatctgcagtctggaaatgtgacagtagaggttacactgaattacagtgacatctctactcatgcaatccatcttgccctgtgcagatcacaacagtctcaaatgcttccagcccggcatcttcacctgcaaaagctctaacccagcacacctgcgtgaagtgcatcagcctctgctggaaaatggaagctcttccaagtaagaaatgaaagagactcagatctttgatctgcagtatgcaactaccaccagtacttgaatwcagactgacatctgaataaaasaaasctctttcttctgtaagaaaaagtataaatacaataaatcctgtcactgttacctgaaaaaaaactgaatattgagaattaagcaactctgggaatgaattttaacattcaaaaattacttccctgctagtgcttgaatatataacttctttttagtaccaaaaatactggcaacatgaactcctaatacaggagtactttctactctaattgaaaggaatacacactaacctactgtcaaaagccttccacatccagtgaacagttcaacccacgggtccatgaaatttattctgc

SEQ ID NO: 94343 - DNA, 600 bp, Chicken  19866894472552_3
acaattcccttctatctgcagtctggaaatgtgacagtagaggttacactgaattacagtgacatctctactcatgcaatccatcttgccctgtgcagatcacaacagtctcaaatgcttccagcccggcatcttcacctgcaaaagctctaacccagcacacctgcgtgaagtgcatcagcctctgctggaaaatggaagctcttccaagtaagaaatgaaagagactcagatctttgatctgcagtatgcaactaccaccagtacttgaatwcagactgacatctgaataaaasaaasctctttcttctgtaagaaaaagtataaatacaataaatcctgtcactgttacctgaaaaaaaactgaatattgagaattaagcaactctgggaatgaattttaacattcaaaaattacttccctgctagtgcttgaatatataacttctttttagtaccaaaaatactggcaacatgaactcctaatacaggagtactttctactctaattgaaaggaatacacactaacctactgtcaaaagccttccacatccagtgaacagttcaacccacgggtccatgaaatttattctgcgttt

SEQ ID NO: 94344 - DNA, 599 bp, Chicken  19866894472553_1
  misc_feature (1)..(103): n is any nucleotide
nnnnnnnnnnnnnnnnnnnnnnnnnnnnnnnnnnnnnnnnnnnnnnnnnnnnnnnnnnnnnnnnnnnnnnnnnnnnnnnnnnnnnnnnnnnnnnnnnnnnnnncatacccaagcacctttcaatgaattaagagaaaaatattttggagatgcatcttgtgtttcccaggctcttattatctgtatcttctgaattgtattttatttttaaaaaagaaaaatagcaggcaagcacatatataaaacagtttatagccctatgcttgtcttcaaagctccacagaagatgcacttctttcsttttttttttctcagatgtgtcattttatagtgtacaaatgactggttaaacaagacgtttgatcattttttattttgggagattattaaaatacttgtcattatttaacgctagatttgtgtgggtgggtcttagactttcccgctgccgtaaactaaaagtctctccagcattaacacctggctctacattgactgatattttaaattagcagctgaagagtctggatgaagagcaagttaatagtatttgcattgatttgctctttgtagcaaggcagacgtattcttttgactgc

SEQ ID NO: 94345 - DNA, 599 bp, Chicken  19866894472568_1
  misc_feature (1)..(42): n is any nucleotide
nnnnnnnnnnnnnnnnnnnnnnnnnnnnnnnnnnnnnnnnnnggttttggttgattggttggttgattgggtttttgttgcttttttttttttttttttttgcaagaagcagacatcaccaaggcattttagcatgtgtttttagagaacctacacaagtcttttgtgggtttcttgatgtgtgccatttataaacactacagaccatccatcatctggtttctgaaagaaagccaagatcagatgttttgggcattctaaatgctatctcgttttttggcttacctgcatgagaaattygtatcttgaatgaaaactccaagaggtcagcaaaaagccatgaatctacacatatcaattgatggcaattaagtcataacttgtaatgatgcaaagtattgcaggatcttccagtcaacagctagaggagtgtgttgaaataagagaagttacagggaagagtcccgtgatgtgaagatatgtagaaacctgacttctaaaagcatgaaaatgttttyctactgaggactgaccttccaggtttgctttttttcccacctcacgattttattgttcttatggagcagatttcagagaag

SEQ ID NO: 94346 - DNA, 600 bp, Chicken  19866894472568_2
gtttctgaaagaaagccaagatcagatgttttgggcattctaaatgctatctcgttttttggcttacctgcatgagaaattygtatcttgaatgaaaactccaagaggtcagcaaaaagccatgaatctacacatatcaattgatggcaattaagtcataacttgtaatgatgcaaagtattgcaggatcttccagtcaacagctagaggagtgtgttgaaataagagaagttacagggaagagtcccgtgatgtgaagatatgtagaaacctgacttctaaaagcatgaaaatgttttyctactgaggactgaccttccaggtttgctttttttcccacctcacgattttattgttcttatggagcagatttcagagaagtctttcactctctcatagagaaagcaggaagatttatgctgagcttattgctagcggcatgatttcattacagaacactaagactgtaattttgtatgcttatacagaatgtttaatgcacacgttaagctagatgtgctttatttcagtttgtgtaacagcctaaatggcataacagtatgatacactcgtttatttggcactgaagctcagattcgg

SEQ ID NO: 94347 - DNA, 600 bp, Chicken  19866894472570_1
tcatggaggtgctgctttgggaacaaggttgtccagagaagctgtgcagcctctatccttgaaggcatccaaagcatccccttagctggctactggaggatgcaggtgaagtctggggacccagtctgatttgaagacctgagcagcaacacaggagctcatgacacatgctggctgtgcagggcgagcagtggagccagcagtgaacgcaagtgccaaatcctgcaggtttgggtaggaaggtgggagctcaaagcgggtaccatgggaggatgctggaggctgagcacagtgcagctycgtggctgccgctcccttccaacctctgggcactgctgaaatggattgggactgtttccaagaattacctcttgtgatttgctctccctggggtttccctcatgagggggcccacgctccagcccgagggggagccgtcctggctgctcccctcgggctctcctcgtgtcggttgtactgaaatgctttattttgtcaagaaacaaagtcactccttcagcgagcctccccgccccgttacggtgttgggttacaaacagccctttccagctaagctcacccatccttacgggtgttcca

SEQ ID NO: 94348 - DNA, 600 bp, Chicken  19866894472574_1
gcctcctactccagggcagagctatcttctgtttcctaaaatactaagcagacacctctagttctcttttaaaatactatatcagtacactaataccatcacaaattctcaaagagccacactattttgaataaatcaaagctgatttagcaaaaacctgaaatgactttaatcaactaaatatttaagatttggctttacttgtttctgttcataattgagatgaaggaaaccagattgctttgacttgtatcaaaaatcatgcatacttaatattcagaagaacagattttgacttayaagaataacacaaatactacctttctcccaactgtattctcttcagacagaaaaaaatattcttgtgctattyatggtcacaggtatcaaagggcatcctaggctgctcttaagaataaaagttaacattgagaacatatatcaaatatactagcttcagtcttcctgaagagtagtgtcaaagtcagrcttccccarggaagataaagcttttgatggctaccaaaatctccaagtgccccaagctgcacgtaaaatattaaagtacatgccgctgaatccactgggatttgtaaggct

SEQ ID NO: 94349 - DNA, 600 bp, Chicken  19866894472574_2
atactatatcagtacactaataccatcacaaattctcaaagagccacactattttgaataaatcaaagctgatttagcaaaaacctgaaatgactttaatcaactaaatatttaagatttggctttacttgtttctgttcataattgagatgaaggaaaccagattgctttgacttgtatcaaaaatcatgcatacttaatattcagaagaacagattttgacttayaagaataacacaaatactacctttctcccaactgtattctcttcagacagaaaaaaatattcttgtgctattyatggtcacaggtatcaaagggcatcctaggctgctcttaagaataaaagttaacattgagaacatatatcaaatatactagcttcagtcttcctgaagagtagtgtcaaagtcagrcttccccarggaagataaagcttttgatggctaccaaaatctccaagtgccccaagctgcacgtaaaatattaaagtacatgccgctgaatccactgggatttgtaaggctaaattgtttgtttgcatggctgtgatagggttaaacctgcacttatttcagagaacaaataaacacaattacc

SEQ ID NO: 94350 - DNA, 600 bp, Chicken  19866894472574_3
atttggctttacttgtttctgttcataattgagatgaaggaaaccagattgctttgacttgtatcaaaaatcatgcatacttaatattcagaagaacagattttgacttayaagaataacacaaatactacctttctcccaactgtattctcttcagacagaaaaaaatattcttgtgctattyatggtcacaggtatcaaagggcatcctaggctgctcttaagaataaaagttaacattgagaacatatatcaaatatactagcttcagtcttcctgaagagtagtgtcaaagtcagrcttccccarggaagataaagcttttgatggctaccaaaatctccaagtgccccaagctgcacgtaaaatattaaagtacatgccgctgaatccactgggatttgtaaggctaaattgtttgtttgcatggctgtgatagggttaaacctgcacttatttcagagaacaaataaacacaattacctgacctctgatctctcaagatttaaacaagactcattccttcatgcttcagctctagtgatttgctcatttgcaggatcaaagaggtagtctattttcaatttacactgagcgtaa

SEQ ID NO: 94351 - DNA, 600 bp, Chicken  19866894472574_4
tacttgtttctgttcataattgagatgaaggaaaccagattgctttgacttgtatcaaaaatcatgcatacttaatattcagaagaacagattttgacttayaagaataacacaaatactacctttctcccaactgtattctcttcagacagaaaaaaatattcttgtgctattyatggtcacaggtatcaaagggcatcctaggctgctcttaagaataaaagttaacattgagaacatatatcaaatatactagcttcagtcttcctgaagagtagtgtcaaagtcagrcttccccarggaagataaagcttttgatggctaccaaaatctccaagtgccccaagctgcacgtaaaatattaaagtacatgccgctgaatccactgggatttgtaaggctaaattgtttgtttgcatggctgtgatagggttaaacctgcacttatttcagagaacaaataaacacaattacctgacctctgatctctcaagatttaaacaagactcattccttcatgcttcagctctagtgatttgctcatttgcaggatcaaagaggtagtctattttcaatttacactgagcgtaaagagaacac

SEQ ID NO: 94352 - DNA, 600 bp, Chicken  19866894472574_5
aacttagagagccaacaatgctcattacaagtccagaattacaaaactggtgttggacagtttggaaagcctagcaatgaagccaaataactaataaagccaacagtacaatgggaagaagccctattctttccagggctcaaactactgtatgcaggtctacttttcatgcaactacggaacttataaggattcttctttaaaaaaaaaaaaaacaatctgttacagctgtgtgggtcagagcatgctacaggaggagacatttggtcactaggacatatccctagaatctgaggttasaaacaatctcttccataaatgaacacaagactggttcaatttcattatccatcagaatactgttttggaatgaattcacactgataaaactgaatattataaaaggtcaatttaccttgtccaaaaacttaaatgagatatctccatattatttgcaaccgtcttataagcaagcaggactcagtatctgacactcagtacmcctggaattgctctactatcgatacacgcttctcaaaacagtctgtactcttgactagagtaagtgctgcattggatgcattacttgaaactcagtcc

SEQ ID NO: 94353 - DNA, 600 bp, Chicken  19866894472574_6
aaaaaaaaaaaaacaatctgttacagctgtgtgggtcagagcatgctacaggaggagacatttggtcactaggacatatccctagaatctgaggttasaaacaatctcttccataaatgaacacaagactggttcaatttcattatccatcagaatactgttttggaatgaattcacactgataaaactgaatattataaaaggtcaatttaccttgtccaaaaacttaaatgagatatctccatattatttgcaaccgtcttataagcaagcaggactcagtatctgacactcagtacmcctggaattgctctactatcgatacacgcttctcaaaacagtctgtactcttgactagagtaagtgctgcattggatgcattacttgaaactcagtcctaccgacaaatgagaattagaacttttatcttttctacagcttagttgcaagccccaatgcctgcagtgtaacatgaatgcactctcaaattctagctccctggagcaataaaaagagttccaagcacatgattactgagccaatctcctgtcttatattttatcccttgggtttgaaatttctgattactatgaatgtaca

SEQ ID NO: 94354 - DNA, 599 bp, Chicken  19866894472577_1
  misc_feature (1)..(113): n is any nucleotide
nnnnnnnnnnnnnnnnnnnnnnnnnnnnnnnnnnnnnnnnnnnnnnnnnnnnnnnnnnnnnnnnnnnnnnnnnnnnnnnnnnnnnnnnnnnnnnnnnnnnnnnnnnnnnnnnnacttttccgaagtggagatttagtctaaggcagatcactagagcacgcaacaaactttaaagaggaaagagcacaagctttgctatttgttttccaactatcactttgaaccaagtgctaatacacaaaagagcaggttgaaagtgcaagtctgtgttcagaagtagttttaagtccctgaaatcayagacacctttcagtcgatgtagttacagaagacagcaaacttatgtggtaatgtgatatttctgctcatcgagtcagggtgagtcaacrtgaacaaagaaaagcatcrtgtgtttaaagaaatgaataatgctggctttccatctcctcagtctaacagcttcaactggttctttgaacttcttactatataaaatgagatattacctttgttaggtaagtgcatgtaatgattattgtttatacartgctttaaagctagaccagaatataaatatcaagattagctctgcactcagt

SEQ ID NO: 94355 - DNA, 599 bp, Chicken  19866894472577_2
  misc_feature (1)..(24): n is any nucleotide
nnnnnnnnnnnnnnnnnnnnnnnnacttttccgaagtggagatttagtctaaggcagatcactagagcacgcaacaaactttaaagaggaaagagcacaagctttgctatttgttttccaactatcactttgaaccaagtgctaatacacaaaagagcaggttgaaagtgcaagtctgtgttcagaagtagttttaagtccctgaaatcayagacacctttcagtcgatgtagttacagaagacagcaaacttatgtggtaatgtgatatttctgctcatcgagtcagggtgagtcaacrtgaacaaagaaaagcatcrtgtgtttaaagaaatgaataatgctggctttccatctcctcagtctaacagcttcaactggttctttgaacttcttactatataaaatgagatattacctttgttaggtaagtgcatgtaatgattattgtttatacartgctttaaagctagaccagaatataaatatcaagattagctctgcactcagtaagatgttctagtgcagcatggttgcaaakcatctctggagctgaggatgctagtagaccatattcgttccttgcccaccaatttgact

SEQ ID NO: 94356 - DNA, 599 bp, Chicken  19866894472577_3
  misc_feature (1)..(5): n is any nucleotide
nnnnnacttttccgaagtggagatttagtctaaggcagatcactagagcacgcaacaaactttaaagaggaaagagcacaagctttgctatttgttttccaactatcactttgaaccaagtgctaatacacaaaagagcaggttgaaagtgcaagtctgtgttcagaagtagttttaagtccctgaaatcayagacacctttcagtcgatgtagttacagaagacagcaaacttatgtggtaatgtgatatttctgctcatcgagtcagggtgagtcaacrtgaacaaagaaaagcatcrtgtgtttaaagaaatgaataatgctggctttccatctcctcagtctaacagcttcaactggttctttgaacttcttactatataaaatgagatattacctttgttaggtaagtgcatgtaatgattattgtttatacartgctttaaagctagaccagaatataaatatcaagattagctctgcactcagtaagatgttctagtgcagcatggttgcaaakcatctctggagctgaggatgctagtagaccatattcgttccttgcccaccaatttgactttgcttggagtctctggat

SEQ ID NO: 94357 - DNA, 600 bp, Chicken  19866894472577_4
aggttgaaagtgcaagtctgtgttcagaagtagttttaagtccctgaaatcayagacacctttcagtcgatgtagttacagaagacagcaaacttatgtggtaatgtgatatttctgctcatcgagtcagggtgagtcaacrtgaacaaagaaaagcatcrtgtgtttaaagaaatgaataatgctggctttccatctcctcagtctaacagcttcaactggttctttgaacttcttactatataaaatgagatattacctttgttaggtaagtgcatgtaatgattattgtttatacartgctttaaagctagaccagaatataaatatcaagattagctctgcactcagtaagatgttctagtgcagcatggttgcaaakcatctctggagctgaggatgctagtagaccatattcgttccttgcccaccaatttgactttgcttggagtctctggatgctactataatgtcagacatagaatcgcaggatggcttgggctggaaggggccttaaagatcatctagttctaaccctcaatcctagatatgatttatattttgtcattacacagccaaaaaagatcattaaatacttcc

SEQ ID NO: 94358 - DNA, 600 bp, Chicken  19866894472577_5
agacagcaaacttatgtggtaatgtgatatttctgctcatcgagtcagggtgagtcaacrtgaacaaagaaaagcatcrtgtgtttaaagaaatgaataatgctggctttccatctcctcagtctaacagcttcaactggttctttgaacttcttactatataaaatgagatattacctttgttaggtaagtgcatgtaatgattattgtttatacartgctttaaagctagaccagaatataaatatcaagattagctctgcactcagtaagatgttctagtgcagcatggttgcaaakcatctctggagctgaggatgctagtagaccatattcgttccttgcccaccaatttgactttgcttggagtctctggatgctactataatgtcagacatagaatcgcaggatggcttgggctggaaggggccttaaagatcatctagttctaaccctcaatcctagatatgatttatattttgtcattacacagccaaaaaagatcattaaatacttcctgtgtcacatctgtcaattaaatgtcagacgttctcaaaagctcccaatatttacacatactcgagcaatcagattttcact

SEQ ID NO: 94359 - DNA, 600 bp, Chicken  19866894472581_1
ccgaatcctagtcttgaaccaatgcaaaagatctaagagacaaaaaacatggaagagagcagatactaagtaagcaagccaggagtcttcacaatgtgtgaccatacactgacaatatgaagtccaacgttttatatatgcagcctcagggcagtaaatgcacagagtaaattaatgtacgcacctgaataatcatctgttccataatcttctgtgggatcttcaactggactggagcgtactctttccacttttggaaaatcatttcttggtgagtatggctggatggatgttccatamagtactaaggaccactctttcaatttgcctagaagtattaaaaacctagttttataaatcatttcatgttttctctgtcttacagaatatatcacctgtgaacaggaactctgagtaggcatagaagactttgcttaatttaatattgacagcacaatctctgtttcaccgtaaactgagaaaacacactttcttcaaccagattttgcacagtattttttgcactcccctctcttgcaagtctaataaaagtttgtaaggggtaactcaatataagccataaacaaaaaccttaggcca

SEQ ID NO: 94360 - DNA, 600 bp, Chicken  19866894472590_1
tttaagatgtatttttttttccctttaaagtatgtaaataactgtgatctctatgtaagtgtaagtatgtccagttggacaactgttttctggtttactgtttgttcttatttcctgatgtctttcagcatttaacccttacaggatttgtcttctactgacatttttcatgtatattaagtggttttttccaaagagactcacaattctcccagtcccagaccattagtattttttatgagtttggtacgtagcttgtctgcgtttcaataagattgagggctacttattttatcttgsttattaaatgatacttaagtgcagaatatgtaaaactactctttttatttgggacgagaaaataagccacaaaaatatcaaaagcattacttagcacgttgattatcaggaatatagaagaaaacaaaaatattaacaaacatttcattataggaagttgtggaagtggaagaggggttttattgcatgaagatgagaaaatggtggtgacatcatgatgttgggtgaaggtcaggcatttaggcttttctctttatctgccctagacactattgattgtgaagatgtttactatctgcc

SEQ ID NO: 94361 - DNA, 600 bp, Chicken  19866894472592_1
tcttcagtgctgcacaaagaagcatctggcaaatttcttagagctacaactacctcatagctcctgtcagcgtgcagcaggcagaaatgcaaggcagtagtctgtgttcagaagtctaacatacagcttaagatcaatttttaatgatacttctataaaaccatcttaacatactgttgttttgttgtttggttttagctttttaccgaggaaaaataatatatatttacatagttcctttgacgtatagtcctttttttcttggttgtaggttgtggatgtgttggtacaggtctgctrctattaaggatgtgggtaacagtttaacatgacaagtcattgattgaactattacttcccttgtctaactgcattataggatatgcatacagtagaccccaaatagccagccataagaaagggcagaatcctaacacgagaagtaaaaatgcagactgggtttagaactttgcctccttacccacatctacaccatcacaatgaagtggatgcgatatacctccagaaacagaagaacaaacatcagtattcactgccatagtctcctggttcgtgtattagttcatattaccaagaaaa

SEQ ID NO: 94362 - DNA, 599 bp, Chicken  19866894472600_1
  misc_feature (1)..(54): n is any nucleotide
nnnnnnnnnnnnnnnnnnnnnnnnnnnnnnnnnnnnnnnnnnnnnnnnnnnnnncccaacttcaagagctaggattggattggaaaacactgtgctgggcttagagaagataattatttggcagggctactctgcactatttttgtcctgaaagcaccatgcattcacaagatgtgatgttcagagaagttgtttgagccatcacatagcaaataacatcactgaaacaaccgcaggactctatattgaggctccctcaatatttttccagggtgaagtagccttcttactcggacaaayagaaggagcattgctctgtgtcagtcagacaatgaactctcaataaacacatttcagccaaataggcttttgctctgtcagcagaatatcacakattcaaggtcaacaaaataaaaaaaatcacacccaaggtttcccacagcacagacacacggctcacagtgggacataaactctattcattcactgttttcagtgagggcattaaacagttgagaaaatgagcgttggaaagacaaaaaaatcacaaaactcattctacaaaagaaaaaaaatgaactgccaaaaaacaggaagtt

SEQ ID NO: 94363 - DNA, 600 bp, Chicken  19866894472600_2
ctgggcttagagaagataattatttggcagggctactctgcactatttttgtcctgaaagcaccatgcattcacaagatgtgatgttcagagaagttgtttgagccatcacatagcaaataacatcactgaaacaaccgcaggactctatattgaggctccctcaatatttttccagggtgaagtagccttcttactcggacaaayagaaggagcattgctctgtgtcagtcagacaatgaactctcaataaacacatttcagccaaataggcttttgctctgtcagcagaatatcacakattcaaggtcaacaaaataaaaaaaatcacacccaaggtttcccacagcacagacacacggctcacagtgggacataaactctattcattcactgttttcagtgagggcattaaacagttgagaaaatgagcgttggaaagacaaaaaaatcacaaaactcattctacaaaagaaaaaaaatgaactgccaaaaaacaggaagttcttgaaaatgcttgaatttgtacctactattcaaacttaacaatagactctgcgagagtggcgtgcttggtataatagccagtaggagtatgaga

SEQ ID NO: 94364 - DNA, 600 bp, Chicken  19866894472600_3
aatcacacccaaggtttcccacagcacagacacacggctcacagtgggacataaactctattcattcactgttttcagtgagggcattaaacagttgagaaaatgagcgttggaaagacaaaaaaatcacaaaactcattctacaaaagaaaaaaaatgaactgccaaaaaacaggaagttcttgaaaatgcttgaatttgtacctactattcaaacttaacaatagactctgcgagagtggcgtgcttggtataatagccagtaggagtatgagatgcagaaggaaaatccgctgctaraagagaattctatccttataactgccatcatgtcacgcattgcatttcatcgttcatttttggtcatgactgcttgacttctgcaaaaatcacctccgaacttctggtctaaaaaacaacgatcatcgtttcctcgttactcatgcctgtgtcacacaggaaaaagcccattcaaagccgtgtggaagagtccaacacaacggaaagggcaaatgagcccagagtgtttgtggctgcaaccagagtgcatttactggcttaattctggctgcttttgtagtctcactgtcatcatttgca

SEQ ID NO: 94365 - DNA, 599 bp, Chicken  19866894472611_1
  misc_feature (1)..(164): n is any nucleotide
nnnnnnnnnnnnnnnnnnnnnnnnnnnnnnnnnnnnnnnnnnnnnnnnnnnnnnnnnnnnnnnnnnnnnnnnnnnnnnnnnnnnnnnnnnnnnnnnnnnnnnnnnnnnnnnnnnnnnnnnnnnnnnnnnnnnnnnnnnnnnnnnnnnnnnnnnnnnnnnnnnnnttaatgctgttatctctgagatcaggttcactgagccttattcagacaactgcatgattgagtgtcatctttccagattgccttctactattttatcatccttccctcagcacccccctccattcccctcccccaraccaccattcatttatatctgctgtgttattctctgagtacrtttcttgcttgggtaaaaaatttcaaaaattttcgtaggtcattaataaattcattctcaaactgattcatgaagtcagctttataaagacagtattcctccagctcagatagtctgggaacatcttttatatttcagtaaggtgattcattagacctaaataatttccaattctttatttattcatcagtaaaaatagatggcatacaagtatccatataaggaaatgtatactttttgaatgtatgaaactctta

SEQ ID NO: 94366 - DNA, 599 bp, Chicken  19866894472611_2
  misc_feature (1)..(122): n is any nucleotide
nnnnnnnnnnnnnnnnnnnnnnnnnnnnnnnnnnnnnnnnnnnnnnnnnnnnnnnnnnnnnnnnnnnnnnnnnnnnnnnnnnnnnnnnnnnnnnnnnnnnnnnnnnnnnnnnnnnnnnnnnnttaatgctgttatctctgagatcaggttcactgagccttattcagacaactgcatgattgagtgtcatctttccagattgccttctactattttatcatccttccctcagcacccccctccattcccctcccccaraccaccattcatttatatctgctgtgttattctctgagtacrtttcttgcttgggtaaaaaatttcaaaaattttcgtaggtcattaataaattcattctcaaactgattcatgaagtcagctttataaagacagtattcctccagctcagatagtctgggaacatcttttatatttcagtaaggtgattcattagacctaaataatttccaattctttatttattcatcagtaaaaatagatggcatacaagtatccatataaggaaatgtatactttttgaatgtatgaaactcttattaagctacaggttctgcaacaatattttttccaggatttat

SEQ ID NO: 94367 - DNA, 600 bp, Chicken  19866894472613_1
gttttagtgaggatcgggaggccagtaaacactgtgaccaaggatgaacccaggggcatgtgaaggagagctgatggcctgcagcttttggaatgcaagtagccccagagcagctcaggagcatcttctgctctaagatatggctgctagtcagttccctgcagccctgggacccgctgggaggtgtgagtcttaaccaggataagatgatgccatgtcctgtaggttacccccaaaatgtctggtctacactggtctgctgtcagcctctgcttgtgagtctgagccttcctgctgctyggttcmtgggggagcagggtgggtttctgtggctgctggatgtgtgaaaatttcagtaggcagctctcagctcagtgcacagggaagaagagtaaaagaggtaaaccaaggggcatatattgcaaacttccacttggcatttatattctgaaaaacagattgaataaattagatttcattatgtttgttactaattagtttcagagaaaaaatgggagaaaggtcccttatggatagctttgatgacccatagcctggcaaaaagacctcactgcttaaaaactcatcactctttccata

SEQ ID NO: 94368 - DNA, 600 bp, Chicken  19866894472613_2
gtgaggatcgggaggccagtaaacactgtgaccaaggatgaacccaggggcatgtgaaggagagctgatggcctgcagcttttggaatgcaagtagccccagagcagctcaggagcatcttctgctctaagatatggctgctagtcagttccctgcagccctgggacccgctgggaggtgtgagtcttaaccaggataagatgatgccatgtcctgtaggttacccccaaaatgtctggtctacactggtctgctgtcagcctctgcttgtgagtctgagccttcctgctgctyggttcmtgggggagcagggtgggtttctgtggctgctggatgtgtgaaaatttcagtaggcagctctcagctcagtgcacagggaagaagagtaaaagaggtaaaccaaggggcatatattgcaaacttccacttggcatttatattctgaaaaacagattgaataaattagatttcattatgtttgttactaattagtttcagagaaaaaatgggagaaaggtcccttatggatagctttgatgacccatagcctggcaaaaagacctcactgcttaaaaactcatcactctttccataatcact

SEQ ID NO: 94369 - DNA, 600 bp, Chicken  19866894472617_1
agttacacatacaacttgctcatgttagacaaccagtaaactaactgtaaattcaacacattcagtcaattttatttttttattcatatttacaaccagtttttaaaaattaactcaatagtacttcttggccagttattgtggattaatatcaaagcttaagagtcaaaatggttaatctggtcaacagcagttggtagcattacaagttcgactcactgtaaagtccaacaaaaaagatttatgcttttttgattacatttaaggaaggaatcctttagcataagggtggtgaggcaytggaaaaggttgcccagagaagctatggatgtcccatccctggaaagccaagctgkaagggagccatgggcagcctgatctagtgaaaagcatccctgcccataacagtggggttggactagatgacattcagggctccatttcaaccattctttgattcaatgcagccagaagatctccatcagtgaaggtgaatttgcacaccaaccactccctggattccacattcagggctccagttagctaacagctatacacctgagctacactgacagatccaactgagtacagatgctaaaa

SEQ ID NO: 94370 - DNA, 600 bp, Chicken  19866894472617_2
cacattcagtcaattttatttttttattcatatttacaaccagtttttaaaaattaactcaatagtacttcttggccagttattgtggattaatatcaaagcttaagagtcaaaatggttaatctggtcaacagcagttggtagcattacaagttcgactcactgtaaagtccaacaaaaaagatttatgcttttttgattacatttaaggaaggaatcctttagcataagggtggtgaggcaytggaaaaggttgcccagagaagctatggatgtcccatccctggaaagccaagctgkaagggagccatgggcagcctgatctagtgaaaagcatccctgcccataacagtggggttggactagatgacattcagggctccatttcaaccattctttgattcaatgcagccagaagatctccatcagtgaaggtgaatttgcacaccaaccactccctggattccacattcagggctccagttagctaacagctatacacctgagctacactgacagatccaactgagtacagatgctaaaaaagtctctgttcttctgtctggcttctcatagtgtgtcttagaagacctgctcata

SEQ ID NO: 94371 - DNA, 600 bp, Chicken  19866894472626_1
gaaatgacaggacactaggaaacagcacaaagctgcaccaacaaaggttcaaagtggacattaggaataattgatttgtggtatgggtggccagacactgcgacaggcttcctagagaggtggtcgatgccctgtgccaaacccatacacaaggcaacaggtaaggctagaagacaagagcagtaaagcactgtgaatagtaatgaacagtccttcaagaaaagtggaggaaaaaagcctgtattctgatgtagactagacctcagtctgagcttgctgcctttcaatgatctttgcagyggtctgagatacatttgtgtgcccaatggagtcagtattaagtttgatgacttactgccaagtcagctccagaactgaaatagtataactgtacaaccaaagtagagttgcagaagatacttgaactagttcagaaatctgttgtcctaaagcagcaataaccttcaggggcatttgtgctacagccacattagtgtactgatagtgtagtgagtacagtagtgtactgtactcacctaactcaagagttcacagccatgctgatgcactatgttttgcaaatatcagcagttgtcacag

SEQ ID NO: 94372 - DNA, 600 bp, Chicken  19866894472635_1
caaaaatttctcacaacttttggttgctaagtgttttatttattaatgatatttaatcttagatttgcactgtgaagttcttagatctttatacggaagctttatacaaaagctttcacgggtaacagtgacttagtgaatggaaagctcagaacaggtgaagatagaaaacaaatgcaaaggtgaatatatcaacagaggcacaacacaaattcaaattatagagggtttctgaaatgtcctgcttcctaaaatgttaagctagtgtttgtgaggatgtgagctgactgtaatgtaatrtcatttttagtctgcaagatgtttgagacatacactcaccagtgaataaagggaggtaaggaaaagctccaaatgacttcagtcctcagtaggaaggcatggatttacatcactcagtgaagccacgttagtgaccacatttctctatacaacctgtaggtatcatactggactgctaacaggagttcctgtcatactcaggatgaactcctcagcttccttgggaaaaccttcctgtggacacttgcatcacatgtgatgctgatatttctttcccacagacttacattttaggggaaa

SEQ ID NO: 94373 - DNA, 600 bp, Chicken  19866894472643_1
gctacgaaaagttaaggtatgtgaactttaagtgttcccctttggaagtaattcatgtctgttatattttagtgcaattcatctgactagaaaagaaaaagaccccctccagcatcgtatcatcaaatcatgaatctaagcacaagcagactgtattagatccattactctgcacaacagtcacaaggaatgaccaccatttacttcctagttgtgttagcatgtctgtgagctaattaatgaaaaagagcaactgaaaaaatagcagccaaagacaaagaaaaaggagcatttagaaayctttccactaatcagattgaaaaaaaacctgaactatttaacaaactctttaaaagtagaagaaatgaaactatttagtctacaagccgtggcatctcttggaggacagtgaagtacctgtaatgagactgccaattaagtggagagaagtcaggagattgtcctcatagttcaagtattttgttwcaaataatctgccaaatgatgtccctccataaaaatcattgttctaaactgttaaaatcagcatgggtatagaagagcttggattgagtactgtcgggaaagctcgttttacta

SEQ ID NO: 94374 - DNA, 600 bp, Chicken  19866894472643_2
ggaatgaccaccatttacttcctagttgtgttagcatgtctgtgagctaattaatgaaaaagagcaactgaaaaaatagcagccaaagacaaagaaaaaggagcatttagaaayctttccactaatcagattgaaaaaaaacctgaactatttaacaaactctttaaaagtagaagaaatgaaactatttagtctacaagccgtggcatctcttggaggacagtgaagtacctgtaatgagactgccaattaagtggagagaagtcaggagattgtcctcatagttcaagtattttgttwcaaataatctgccaaatgatgtccctccataaaaatcattgttctaaactgttaaaatcagcatgggtatagaagagcttggattgagtactgtcgggaaagctcgttttactaaggtgagcaggaagctgcacaagcccccagtcaccgcagtgagatgagaacctcttatcccagggaaaagtgccagatctgaacctttcagctgtttgtcctgcttgaaggtaggagtcagattgaggatggactggtgagagaaacccctgcagaagcacagagcttggtcacatctcactggtg

SEQ ID NO: 94375 - DNA, 599 bp, Chicken  19866894472649_1
  misc_feature (1)..(65): n is any nucleotide
nnnnnnnnnnnnnnnnnnnnnnnnnnnnnnnnnnnnnnnnnnnnnnnnnnnnnnnnnnnnnnnnnagtagaattgtggctgttttgctgaccgatcaatagtagcctgatagacaagctactgcgagcttgactttaaagtggtggtttagcataatttcaaatatgaaaccttctttctgtgtatttgctagatagcttggcattgtgaattcttcagtctctggcactactacttcttgcagttaatattctgcatgagctgacacatttataaagacagcagtaccgtatgtatatycagtgatgctctggtacaagtgtgccacgtctgtagtaccatatccttgtctgatgttcattttatcaaagtctagagctctaggcagaagtcatccaataaactaatttgtaattttagaatgtttctcatgaggaaacaaagaagaaaacmaatatactgaattatttcaatgagttccatcataagacaggagtaatctactttctctgcttgcaaaaacccagtataagggggcaaaactgttgataaatcatctctgtacttcttaacaacaacaacaaaacacatttcgtagt

SEQ ID NO: 94376 - DNA, 600 bp, Chicken  19866894472649_2
taatttcaaatatgaaaccttctttctgtgtatttgctagatagcttggcattgtgaattcttcagtctctggcactactacttcttgcagttaatattctgcatgagctgacacatttataaagacagcagtaccgtatgtatatycagtgatgctctggtacaagtgtgccacgtctgtagtaccatatccttgtctgatgttcattttatcaaagtctagagctctaggcagaagtcatccaataaactaatttgtaattttagaatgtttctcatgaggaaacaaagaagaaaacmaatatactgaattatttcaatgagttccatcataagacaggagtaatctactttctctgcttgcaaaaacccagtataagggggcaaaactgttgataaatcatctctgtacttcttaacaacaacaacaaaacacatttcgtagtcacagtcctagtaagagccttaacttttcagtttgcaatgtgatatatgcttccataatctctgcaagtgcttttttgtacattctgccttggatctgattctttaaataatagagaataaatattcaaatatcagtagccctatttacaaaat

SEQ ID NO: 94377 - DNA, 599 bp, Chicken  19866894472651_1
  misc_feature (1)..(140): n is any nucleotide
nnnnnnnnnnnnnnnnnnnnnnnnnnnnnnnnnnnnnnnnnnnnnnnnnnnnnnnnnnnnnnnnnnnnnnnnnnnnnnnnnnnnnnnnnnnnnnnnnnnnnnnnnnnnnnnnnnnnnnnnnnnnnnnnnnnnnnnnnnnncaaatacttgcaaatttgcgtatcctgttaggaattatctgtcaataattttcagcaggaaagtacataaccagtgttctttctcctgagatagtttctatagatctgtgtgcttctctgacagtaaaaacatttttccttatccctctcattaaatccyttgtggtgctcaaatactagcagtaatggtgaaaagtgtagtttaacctttgtagtctttgtagcacatgttaaacatttaatgcttagtatttccgtggtyacaggaagagaaaataaggagaaatattgcttggaaatctgattttaatccttgcctctcaaccaaatatactgtaaaagcagtttatctgttgactgtatcaccttgggtgtgattgtatgaatatgtatttacttaaaccctttccatatacaccttattacagtggcatattaggaatgactagcgtgtctccc

SEQ ID NO: 94378 - DNA, 599 bp, Chicken  19866894472651_2
  misc_feature (1)..(38): n is any nucleotide
nnnnnnnnnnnnnnnnnnnnnnnnnnnnnnnnnnnnnncaaatacttgcaaatttgcgtatcctgttaggaattatctgtcaataattttcagcaggaaagtacataaccagtgttctttctcctgagatagtttctatagatctgtgtgcttctctgacagtaaaaacatttttccttatccctctcattaaatccyttgtggtgctcaaatactagcagtaatggtgaaaagtgtagtttaacctttgtagtctttgtagcacatgttaaacatttaatgcttagtatttccgtggtyacaggaagagaaaataaggagaaatattgcttggaaatctgattttaatccttgcctctcaaccaaatatactgtaaaagcagtttatctgttgactgtatcaccttgggtgtgattgtatgaatatgtatttacttaaaccctttccatatacaccttattacagtggcatattaggaatgactagcgtgtctcccttttatattccaattcaatctagttttcagtaaccttagtgaaaactttgggcagcatcatactcacagtgtggctggtgtccatctttgagtcagtttgat

SEQ ID NO: 94379 - DNA, 600 bp, Chicken  19866894472678_1
agatccatgcacaagtgcaatgggaactgctcgttggagggcagggacagagcatgggatgtggcaaaaggtgatgtagaaaatgaagtccagaaatacttggccagaagcaaccaaaaagatggatgcagctaatagttggaacagaaggaaactctcacaagggggtgatgcatatctctatgatgcttatggatccaaaccagtcaattcacaacccagtgtctgcagttatgcaggaaaatagagatgactcatgagatactgcaggacacaacagaacagatatcctgtctgggrgtgctatggggagacgcagcaacaggtgaaagctcagcaaaaacagcaggaggctttggtgtgacccagctttgaaagaaggaaggtgcagttggaaggactggaagtctcacagatgcagaaggaggaaaggacaagtctggcatgagctttgggtcctgctgaaggagtatattctttcatgccggctgactgctgggaaactccagaggtggttatcgctaattatcactgtggttatcactgatgggtcaaacacgagtgtgggaacgtgcatcatctagggacaggggttttgtc

SEQ ID NO: 94380 - DNA, 586 bp, Chicken  19866894472681_1
gctgcagatctgaccttgctaagccaggttctcactgctgataacagatgcttttctacggacttggacagttagtgcagacagcgggtgtcctgtctttgcacgtaacattgttagctcccctatctctggaatgcaaggtagcaggctcaaacagtaaaaccacaaattaacaaagaagcggcggattggtgaacagagttgaggctgatgagacgaccaatcagagccacccatcgtaacccaagcccaagaaaatagcacgatgaccttcatcagaaagaccaccgagagacacgygtgtgtaaaagagctgagacttggggggggggggaagtgtcagtcattctggggactcattgtaataacccaaccttttcttggacatctaatgcatatgtaagcagcttggtctttaagtatgtgcctttcttgccctccggcatgcaggctaggtgggcatatccccccctgcatctggcgggtgcgcagcgctgattagacatacctgctttataactactcagaggtgggattgtgctgtatttgcagttggttccaaacagctcgatacctgtttcgaaat

SEQ ID NO: 94381 - DNA, 599 bp, Chicken  19866894472682_1
  misc_feature (1)..(51): n is any nucleotide
nnnnnnnnnnnnnnnnnnnnnnnnnnnnnnnnnnnnnnnnnnnnnnnnnnntgccacacacaataacatacatgggattgttattctccatgtgggtgcttaaattgcgtatgtatcgatctactgtggtcagacagcttagcggtctctgattctattctttttattgagttcagagtttccaatacatcttcttgataaaacttttttattcttcagcatcaagttttctccttcataaaactgaatatcccaccttagcttgaggcttctttttttctcttgggaatggtaaacagygtttaaagatttctgaacagagtttgtatccaatccctgtaagccctggggctgttgctatttatgtattatggtattaagctaggcaaaattagaaggcaatatttcatctctaattggtgagttcaaaaggctcccacctatgagactctgtaattaaataaggtgactcctagctcactcagttctgcgtaaggattctccctcccccacggccagttcttgttcatgcaaagtaaggcaacgcataccacaaaggacctaacaaaatggccagatattcaaacccagggatccca

SEQ ID NO: 94382 - DNA, 600 bp, Chicken  19866894472687_1
acctatcaaaaagcatataattgccacaacttgaccttgccataatttatttggaatgaacagataagttgattttcaccttgaagatgcatattcagctcatttaaatgagcagcaatatgcaccagaagtgcttaatttgtgaaccttttttaatcctcatgttctagcacaaattttccctttgattccataaatgccttaatttcacaaatcataaactcttagcattttaccccaacttagctaccttacttctaaaaagtaaaggatgtccccataatcagcatccatactttyaaggagctcctggaaataatgatgatttggttcctcagactatatgaaattcacagctttgataacaatttatataatattaactatttttaaagctttcacacataaattttcttgatgtacggtgcagtgatatttcatcaaatttgagttattggtggcaattttgctatcttctattaattttataagtccctctttttttaccaaaattgctgtggtgccaattatagcagtactagggtaagttgacaaaggttaaagaaaatcacgttaatataatttttactgcttcataca

SEQ ID NO: 94383 - DNA, 600 bp, Chicken  19866894472690_1
atttgaagagttaaagtgggtttcctcaacacgtagacttgagagctgtgcaccctttgcaatggcacagtctctgtggaaaaaggacttggtgtgggatgtgctcatctccagagggagtagtcagcttctcctgcaagaaaggaaaggtgttagacaactttcctacaccgacaacacgcttcttacatcagaagaggttcagagctttattataaagagaccacactatctcctgccatcaagaatttggcatgagagcttgactgagatcccattatcaacctatttccaaaatayacaacaacatgtgttgatggagagagctgaagttatgggactgcgataggaacattaactatttgcaacaggtagagacgaagttggcttcatcttgcaacttcccaatctccttgcataagaatgaaccatggaatctctatctgacagacgagggggccatacagctgtgatttgctgcttgtcaagcatgctgagattcttggatggcagatactagcatgggaactattctagtccatggctctgtgtagttactggaactcagaaatgtggataaactacatctcttctgcatgg

SEQ ID NO: 94384 - DNA, 600 bp, Chicken  19866894472690_2
gttggcttcatcttgcaacttcccaatctccttgcataagaatgaaccatggaatctctatctgacagacgagggggccatacagctgtgatttgctgcttgtcaagcatgctgagattcttggatggcagatactagcatgggaactattctagtccatggctctgtgtagttactggaactcagaaatgtggataaactacatctcttctgcatggctgacccccttcacctgcagtcctgtctccaccgggattgcttctcatgttgcaaacctctgagcagcttccaagtcgagcyatggtaagatattgaatctggcaatgcaactctttgtcttcatcctccagagacaggtcaggtgagagcagaatccctgaaagaccaggatttattttgttcagtgctgggctccagggagacaaagactttgcagtaatttgcaatttgctgtggagagaaacactggctttcttcccatgggacccagcaatcctagcaggacctggcattgctttgtgtagcacgtgcagcctctgaccctatttaggatcgtgatttataggatcacgaaagtcttgtgatttacagcgcagctgt

SEQ ID NO: 94385 - DNA, 600 bp, Chicken  19866894472691_1
ctatgatttacaacagaagattttctaggaggtattctatagactttttactttaattacaattctgctgtgtaatgagacttccaaatcaatctgctttcattttcacatccttcttcagttattggaaaagtatttgcttcagtgatgagtgtctgagcgggtacagccacgcctgcctgcatcaccatttctcacctcctgagcaaatagcatcaatttagcttatgctggtatgaaagtaataataaatggaggagtcaaaacagaattaaaggatatcaggtgtgctcccaccamcttagcatcaaattagctctaaagactataaagactatgttttacttagtgaaagtcttaatacagatatgaatttttgagcaaatgctctaaaagaaaagcaaacttcagtgagtgtctccttcagcggatacagcaggatattcatgaacacgtcacaaagtattctgctagctgaacacacacagargcagagctactgatctgctttcccactgacatgaaggtgctgatagaacagcacagagccactgagcacacgtaagccattcctcttgttgcgtaactactgtataagcc

SEQ ID NO: 94386 - DNA, 600 bp, Chicken  19866894472691_2
tttctcacctcctgagcaaatagcatcaatttagcttatgctggtatgaaagtaataataaatggaggagtcaaaacagaattaaaggatatcaggtgtgctcccaccamcttagcatcaaattagctctaaagactataaagactatgttttacttagtgaaagtcttaatacagatatgaatttttgagcaaatgctctaaaagaaaagcaaacttcagtgagtgtctccttcagcggatacagcaggatattcatgaacacgtcacaaagtattctgctagctgaacacacacagargcagagctactgatctgctttcccactgacatgaaggtgctgatagaacagcacagagccactgagcacacgtaagccattcctcttgttgcgtaactactgtataagccacatgcctaataggcacagaacacaaaatgcccacagacaagcaagcaggtatttgactcaattaaaatgtatcatagttaaggatgtggagcctaaataaattaacaagaagataaagctttagaaaaataaaagcggtgtttttgagagctggtcttgaattgctgtaatttcttaagaaaccagagg

SEQ ID NO: 94387 - DNA, 493 bp, Chicken  19866894472692_1
atattaataaaatcaacctagattgccatttattaataaagatagtactgtttggttttttggatgagctcatacagtattagattttttttcttgttacgctatgtattttttttgtataaattacataaatatacctccgctggatccctgcagaactttgatacagccaaggctaatatattccatcttctcgcttttcaaatccttaattgcttttgcataaatgctgagaaatccagcaagaagacagaaaggaaaataacagcacatttaaaaattggcagatcaagctttggmcttcctcctcttctgacagcatccagtcggtgtccttcactcgatggggcagaacaggactctcattttcttaaacacacaacacacagcacacaggagctgacacagcttatcccttgcttttccacagaacgggctcctgtgcacgttggggtatagtcccggggggttttagatttagcccatcatcatt

SEQ ID NO: 94388 - DNA, 600 bp, Chicken  19866894472693_1
agctgtgccagcgcctcaccaccctctgagtaaagaatttcttcctaacatctaacctgaatctcccctttcttagttgaaagccattccccctttgttcagccactatcaaactgtgtaaaaagttggtctccctcatgtttgcaagctccctccaagttcaggaaggctgcattgaggtttccccagagccttctcttctccaaattaaacaagcccagctccccaagcctgtctccatagggggagtgctccagatctctgatcatcttcgtggccctcctctggacccgctccaayagctccatatccaaacatggtaagatgccacaaagtaggtggcagtgccctaaccgtatgcatgctgtacaggccactagggcctccatccttataaagaggactgctaatggtccttcacactttgcagtggattcatgagcaaggctaggttaggtgccatggccatggcaggccatgaagagagccaccaagcagactgtgctcagaagggtttgtgcagcttggttcccaggtcttagccctgaatttgacgcactcatgcttggccaaaggcctctcccatgaagaagtcattat

SEQ ID NO: 94389 - DNA, 600 bp, Chicken  19866894472696_1
aaggtgaataactccgttgtcacagagcctttgggcggctgctggagtcctgaatgcagcattatctcatagacataaatagccagcacctctggtttcactgcactgagtgttaggccgagtctgtcttatttccaccatgttgccttgcttacaatatacctttattgccagtgaagataatgcggtgttaccctgcctaaaaatttcagcttataatgctcggagtttcttcatgcttagcttttgaatttctcttctggctgtatctgcatcagtagacatctgtaaaatagatgyggatttggtgagtcagatgcttcgtatctgtgtgaaagaagtctgaaaagacgcatctgtcctcccgcctcaatccacagaagcaactgggcctgaatgtaaacgtttgtaaatatttgcagtctctgaggaaacaagtcttgtgagatcctaccaggcacctcgcactgcttctctgctgtatgtaagttgacttaggagggcataaaagcatttgttgagagtctgcagttacagatctatacaatatcctgagtcagaagggacccaccaggatcatcaagtccgactctggcttca

SEQ ID NO: 94390 - DNA, 600 bp, Chicken  19866894472704_1
taccttttaagatttttacctatggctgtttttctccctccctcttaagaaccacccccaaaaaaagaaaaaagttgaactacatcactgaggaacgactttatactaatcagtgtgagtgaaacggtgtgtaaataacaaaaggaaaagaaagtcttaatgtagggggaaagcaacacagatctacagcaacaagcagctggcggtaggcagatgtttcctaccaagacctggcagccccccagctctccagtgcactgatttagagacatcagatctcatacttactcctaaaaggarccaggttgaatgaaatggcatggaaagaggatgtccaaatatactgaaagggcaagccccaggtgagtgcatgcttccagtgcttgcaagccaggaaggacaaaaccaagcagcagattttacagcctttgctagaatgtcctgactccataatttgcgctctgtgaggactcactgaagtttcacacaagcacaggaaattaccaaaaatagtattggccccacacactgtgtgattgtaacccacgcactgtgtgatgcatgctcaataccaggcaggcaaatgctgaggatcactac

SEQ ID NO: 94391 - DNA, 600 bp, Chicken  19866894472725_1
tcaacacagaatgcacaaagtgaaatgagtttgatcaggggcaaaaatcctttctttgttgaatgagaatatcaaggtgagaataccatggatgagtctgcatatgtctaaatagaaagttgcctggggctagaaggtcctgtatcaaactgcaagttcctgcagctgggttgggacaatcccaagcacaaatgcaggctgagtggagaatgaattgggagcagccctgagaaggacttaggagtgctggtgggtgaaaatttgaacatgaactttcttgttctttttggcatccctagycaagtttagttcaaactgggctttggctttcctgacctcatccctacacagcctagtagcttccttctactcttcccgtggtacctgtccctatttccactgccagtgcattttcttcttgctttgaacagctagccctggttcagcaacgccactctcttgaattccttttctgagttgctacatctagggatggagagctcttgcgctctgtagaaagactcctcaaagatctgccacctctgctctgcacctttactcatgagaacagtttcccaggttgttttgctgactaactcc

SEQ ID NO: 94392 - DNA, 599 bp, Chicken  19866894472731_1
  misc_feature (1)..(81): n is any nucleotide
nnnnnnnnnnnnnnnnnnnnnnnnnnnnnnnnnnnnnnnnnnnnnnnnnnnnnnnnnnnnnnnnnnnnnnnnnnnnnnnnnaggttactgatacttaaagtacacatctcctatattggtctatttcaatagtttgacagtttctttttttttactaagcttccatcaggtttttcatctctgtaattatttccttcatttaaattactgtcaatttcttcttgacgactaccttgacctgcatcttctccaaaacagcacagaaaacagaagttgcagatattgaaatatcatttttgratgatccagataatgtgcacctcatccaaatgtctctatttacccataatacaaattcagcctattcattcacctttgttttcaagctatttattcctatgtgcttctaatctactgtctcatcactttcctgcctttttaacagcttttttttttttctgaatgaatctcttttattcatagattaaacctatttgccttaactacatgtagaaggtaaacataataattcccctgtaatgtgatatttttatttatacttccaaagcaaagaagaaaaaaaaaagtgtgcatatgca

SEQ ID NO: 94393 - DNA, 599 bp, Chicken  19866894472733_1
  misc_feature (1)..(170): n is any nucleotide
nnnnnnnnnnnnnnnnnnnnnnnnnnnnnnnnnnnnnnnnnnnnnnnnnnnnnnnnnnnnnnnnnnnnnnnnnnnnnnnnnnnnnnnnnnnnnnnnnnnnnnnnnnnnnnnnnnnnnnnnnnnnnnnnnnnnnnnnnnnnnnnnnnnnnnnnnnnnnnnnnnnnnnnnnncttattaaataccaaagtgtagaaatatttgtaattgttatatgaataaagtaggaaaatctacaaaacttggatttgactcaagcatgctctgatttggagtaaacacatgcgttaatggctcattatrtttctttacagaaaagcaagtgaaataaggctaaccaactactcaaatacttatcctcacaagatcctctttatgcgttcatgattatctgcttcattattggtatatactactagtggtgtgatgttttctttcataagcrcagtaatarcaaaatacatctgtaccaaatcattcatgactaattagctccatgtcaggcataccttctccagtataactcaggccagtgcccctgcactaagagcatctttactgacaagtctcaaaacaggatttggtcagccagcagctactag

SEQ ID NO: 94394 - DNA, 599 bp, Chicken  19866894472733_2
  misc_feature (1)..(28): n is any nucleotide
nnnnnnnnnnnnnnnnnnnnnnnnnnnncttattaaataccaaagtgtagaaatatttgtaattgttatatgaataaagtaggaaaatctacaaaacttggatttgactcaagcatgctctgatttggagtaaacacatgcgttaatggctcattatrtttctttacagaaaagcaagtgaaataaggctaaccaactactcaaatacttatcctcacaagatcctctttatgcgttcatgattatctgcttcattattggtatatactactagtggtgtgatgttttctttcataagcrcagtaatarcaaaatacatctgtaccaaatcattcatgactaattagctccatgtcaggcataccttctccagtataactcaggccagtgcccctgcactaagagcatctttactgacaagtctcaaaacaggatttggtcagccagcagctactagagagaattaattcwgattyatktattttgactgatttgactgctcttacctcacattatttaagagcagacattaggctttttgagacccaactacacaggagaaatgggaggctcccttaaggtaatactcactctaatgt

SEQ ID NO: 94395 - DNA, 599 bp, Chicken  19866894472733_3
  misc_feature (1)..(19): n is any nucleotide
nnnnnnnnnnnnnnnnnnncttattaaataccaaagtgtagaaatatttgtaattgttatatgaataaagtaggaaaatctacaaaacttggatttgactcaagcatgctctgatttggagtaaacacatgcgttaatggctcattatrtttctttacagaaaagcaagtgaaataaggctaaccaactactcaaatacttatcctcacaagatcctctttatgcgttcatgattatctgcttcattattggtatatactactagtggtgtgatgttttctttcataagcrcagtaatarcaaaatacatctgtaccaaatcattcatgactaattagctccatgtcaggcataccttctccagtataactcaggccagtgcccctgcactaagagcatctttactgacaagtctcaaaacaggatttggtcagccagcagctactagagagaattaattcwgattyatktattttgactgatttgactgctcttacctcacattatttaagagcagacattaggctttttgagacccaactacacaggagaaatgggaggctcccttaaggtaatactcactctaatgtctttcaaaa

SEQ ID NO: 94396 - DNA, 600 bp, Chicken  19866894472733_4
aagcaagtgaaataaggctaaccaactactcaaatacttatcctcacaagatcctctttatgcgttcatgattatctgcttcattattggtatatactactagtggtgtgatgttttctttcataagcrcagtaatarcaaaatacatctgtaccaaatcattcatgactaattagctccatgtcaggcataccttctccagtataactcaggccagtgcccctgcactaagagcatctttactgacaagtctcaaaacaggatttggtcagccagcagctactagagagaattaattcwgattyatktattttgactgatttgactgctcttacctcacattatttaagagcagacattaggctttttgagacccaactacacaggagaaatgggaggctcccttaaggtaatactcactctaatgtctttcaaaacacagtgttattactttagtagtgatggttgagatcacaatgtaaaacattctcttgatatttaaaagcatctcttttagaagctgcaactgctctaacagaagatagtgtccttacatacraactttgcttcacttacctttgtaatgtgcaggcttcctca

SEQ ID NO: 94397 - DNA, 600 bp, Chicken  19866894472733_5
agtgaaataaggctaaccaactactcaaatacttatcctcacaagatcctctttatgcgttcatgattatctgcttcattattggtatatactactagtggtgtgatgttttctttcataagcrcagtaatarcaaaatacatctgtaccaaatcattcatgactaattagctccatgtcaggcataccttctccagtataactcaggccagtgcccctgcactaagagcatctttactgacaagtctcaaaacaggatttggtcagccagcagctactagagagaattaattcwgattyatktattttgactgatttgactgctcttacctcacattatttaagagcagacattaggctttttgagacccaactacacaggagaaatgggaggctcccttaaggtaatactcactctaatgtctttcaaaacacagtgttattactttagtagtgatggttgagatcacaatgtaaaacattctcttgatatttaaaagcatctcttttagaagctgcaactgctctaacagaagatagtgtccttacatacraactttgcttcacttacctttgtaatgtgcaggcttcctcacctac

SEQ ID NO: 94398 - DNA, 600 bp, Chicken  19866894472733_6
gaaataaggctaaccaactactcaaatacttatcctcacaagatcctctttatgcgttcatgattatctgcttcattattggtatatactactagtggtgtgatgttttctttcataagcrcagtaatarcaaaatacatctgtaccaaatcattcatgactaattagctccatgtcaggcataccttctccagtataactcaggccagtgcccctgcactaagagcatctttactgacaagtctcaaaacaggatttggtcagccagcagctactagagagaattaattcwgattyatktattttgactgatttgactgctcttacctcacattatttaagagcagacattaggctttttgagacccaactacacaggagaaatgggaggctcccttaaggtaatactcactctaatgtctttcaaaacacagtgttattactttagtagtgatggttgagatcacaatgtaaaacattctcttgatatttaaaagcatctcttttagaagctgcaactgctctaacagaagatagtgtccttacatacraactttgcttcacttacctttgtaatgtgcaggcttcctcacctacaga

SEQ ID NO: 94399 - DNA, 600 bp, Chicken  19866894472733_7
aggatttggtcagccagcagctactagagagaattaattcwgattyatktattttgactgatttgactgctcttacctcacattatttaagagcagacattaggctttttgagacccaactacacaggagaaatgggaggctcccttaaggtaatactcactctaatgtctttcaaaacacagtgttattactttagtagtgatggttgagatcacaatgtaaaacattctcttgatatttaaaagcatctcttttagaagctgcaactgctctaacagaagatagtgtccttacatacraactttgcttcacttacctttgtaatgtgcaggcttcctcacctacagagctttctttcctggcaaatgctaaaaatattggaagacttgttagtcttgcaggttagttcatttatcaagaaatcaaacatacacagaaagttgaagagaaactggcaaataagtgactgaaaaaaaataagccagaaaaaaaaagatagaatacagatgaacacaactgatggaaaatgaactaagacaaccattccaaacagggaacacagctgtgaccagctacagaggaaacatgcagatgaggaa

SEQ ID NO: 94400 - DNA, 599 bp, Chicken  19866894472742_1
  misc_feature (1)..(247): n is any nucleotide
nnnnnnnnnnnnnnnnnnnnnnnnnnnnnnnnnnnnnnnnnnnnnnnnnnnnnnnnnnnnnnnnnnnnnnnnnnnnnnnnnnnnnnnnnnnnnnnnnnnnnnnnnnnnnnnnnnnnnnnnnnnnnnnnnnnnnnnnnnnnnnnnnnnnnnnnnnnnnnnnnnnnnnnnnnnnnnnnnnnnnnnnnnnnnnnnnnnnnnnnnnnnnnnnnnnnnnnnnnnnnnnnnnnnnnnnnnnnnnnnnnnnnnntatactatccccacagctggaacaacatctttgaaaacatggcttttcatatstcttgagggaggtaagaaatgagcataatttatgctgcagagctatttttcatcccttcaagaattattcttccagttgacaagtaggctaagttgcccaagattctgctaagtaatgaatagatgaccggaaagattatcctgaaaatctcttactgtgcttaaatgttttccagggatggaaaactagcccatatattaagcgatacttctgagaggctgctcaggaattactgaccaccacagagattcactaaacctctctttggtgcatactcatgggcatggtaaagctgtgg

SEQ ID NO: 94401 - DNA, 599 bp, Chicken  19866894472743_1
  misc_feature (1)..(54): n is any nucleotide
nnnnnnnnnnnnnnnnnnnnnnnnnnnnnnnnnnnnnnnnnnnnnnnnnnnnnnaacatctgcatttttttatagtgagaataaaattgttagctcatagccccccttagtaatttgtcctgaacatagaatcacagaatcatagaatgacttaggttggaaaggacattaaagatcatccagatctaccccactgccgtgggcagggctaccacccaccagatcaggtcatccagggcttcatccagcctgactttgaatctctctagagatgtgacatccacagcttctctgacctgktccagtgcttcatcaccatctcagcaaaaaatttcctcctaatatctaaatctccccttttagtttcaaaccattccccctggtcctttcactacatattttacagctattttaaaacatgcaaactgttgggaaaacaacagttttgttttgtgaaaacaatgagaattcaacatggaatgtacccgcgatatctcaaatgtagcgaacaggagatctccaggagtgtggcattgatagtwtgtaatgtgagaaacaggtcaacaaggaacatctggttttatgcttggtattaatct

SEQ ID NO: 94402 - DNA, 510 bp, Chicken  19866894472743_2
atccagcctgactttgaatctctctagagatgtgacatccacagcttctctgacctgktccagtgcttcatcaccatctcagcaaaaaatttcctcctaatatctaaatctccccttttagtttcaaaccattccccctggtcctttcactacatattttacagctattttaaaacatgcaaactgttgggaaaacaacagttttgttttgtgaaaacaatgagaattcaacatggaatgtacccgcgatatctcaaatgtagcgaacaggagatctccaggagtgtggcattgatagtwtgtaatgtgagaaacaggtcaacaaggaacatctggttttatgcttggtattaatctgtttgttgctacttttttttcttcccattttcaagtggaatcctatccccaaacctttttttttggggggtggttccttctgcttgatacccaaattctattctggaattctttttttcgatagtgtatatatatggaactcctctgttgggg

SEQ ID NO: 94403 - DNA, 600 bp, Chicken  19866894472746_1
attctataaacagcaaaggttgcaagtggtctggtatgttaaagtaatattagagaggatagaaaacagagtctgtaaataaaaaacatgacctggaagtgattatcagcttcttgaaaatgtcttagtgcagttctgagacacattttggaaaatcacaatcatccacttcactgcttttcaagggacattaagccaggattatagaaaggaagaaagcagaagtactccctagacagtttcccaagctgtataatcaatacacacacacttgctgctagaataaatgtagagtaagayttatctcactttgatagatcaaacagtacattgaataaagaaaataaatttatatcaattaawcaattaaattaatgagtacctagaatgaactaacaaaactaccctcagagagagagagaaagttagtttagctcccttattttaatattactataaactatagatttttttttgtccctcccaaaccccttcaaacagttggaattccttgggaaaaggcctccaagaatgagttcacagcaagttttcttcctataagttatccaaccatagcaccaatgacttgaagtattctat

SEQ ID NO: 94404 - DNA, 600 bp, Chicken  19866894472746_2
aaacagagtctgtaaataaaaaacatgacctggaagtgattatcagcttcttgaaaatgtcttagtgcagttctgagacacattttggaaaatcacaatcatccacttcactgcttttcaagggacattaagccaggattatagaaaggaagaaagcagaagtactccctagacagtttcccaagctgtataatcaatacacacacacttgctgctagaataaatgtagagtaagayttatctcactttgatagatcaaacagtacattgaataaagaaaataaatttatatcaattaawcaattaaattaatgagtacctagaatgaactaacaaaactaccctcagagagagagagaaagttagtttagctcccttattttaatattactataaactatagatttttttttgtccctcccaaaccccttcaaacagttggaattccttgggaaaaggcctccaagaatgagttcacagcaagttttcttcctataagttatccaaccatagcaccaatgacttgaagtattctatatttatcttcatctcacaccatagcattgacatttgtgtatcctcctaaaaaatagagaactt

SEQ ID NO: 94405 - DNA, 599 bp, Chicken  19866894472749_1
  misc_feature (1)..(72): n is any nucleotide
nnnnnnnnnnnnnnnnnnnnnnnnnnnnnnnnnnnnnnnnnnnnnnnnnnnnnnnnnnnnnnnnnnnnnnnntttctcttctgatattaatagcaatagggcaggtgaaggagctggattaacaattgggcccggtggctgtccagagcgataatggctttttccccagccaacgcatgctgtttgctgcatggtataatgtgccaggtgtccagagggtagagccagctcttaagctgcttgtcaacccggggtggtgtcattagagcatcatatgtttcagaaagagagtgcccagcragagccctgcattgcagagcagtagctgagatgcttctgctctgcccttctgtcactgtcagaatgtcacagccatcagctgagcaggcgaggcatgtagggatgactcttctgttctgcctcacasatggaatgcttacctttttagttttaggctattgccccttgtcctgtcattatcgtgttacacgataatgctcgtgtaagaagtcagtcccctcaacttctggaaggctgcaatgggatctccccagagtcttctccagattgaacaagctcagctccctcagctcatcctc

SEQ ID NO: 94406 - DNA, 600 bp, Chicken  19866894472749_2
gggcccggtggctgtccagagcgataatggctttttccccagccaacgcatgctgtttgctgcatggtataatgtgccaggtgtccagagggtagagccagctcttaagctgcttgtcaacccggggtggtgtcattagagcatcatatgtttcagaaagagagtgcccagcragagccctgcattgcagagcagtagctgagatgcttctgctctgcccttctgtcactgtcagaatgtcacagccatcagctgagcaggcgaggcatgtagggatgactcttctgttctgcctcacasatggaatgcttacctttttagttttaggctattgccccttgtcctgtcattatcgtgttacacgataatgctcgtgtaagaagtcagtcccctcaacttctggaaggctgcaatgggatctccccagagtcttctccagattgaacaagctcagctccctcagctcatcctcatgagagagaattgctycagccctctgagaatccttgtggcctcttctggacctactctgccagttctacatctttcttaagctgggagcagtactccaggtgggacctctcacctgcccctctgctc

SEQ ID NO: 94407 - DNA, 550 bp, Chicken  19866894472749_3
gagcagtagctgagatgcttctgctctgcccttctgtcactgtcagaatgtcacagccatcagctgagcaggcgaggcatgtagggatgactcttctgttctgcctcacasatggaatgcttacctttttagttttaggctattgccccttgtcctgtcattatcgtgttacacgataatgctcgtgtaagaagtcagtcccctcaacttctggaaggctgcaatgggatctccccagagtcttctccagattgaacaagctcagctccctcagctcatcctcatgagagagaattgctycagccctctgagaatccttgtggcctcttctggacctactctgccagttctacatctttcttaagctgggagcagtactccaggtgggacctctcacctgcccctctgctcccctgtgatgacctgtagggcaccgtgaggcctcttctgcaggagcagctggcggggtatgaaatgtattcctcatgtgcccatggtccagtcttgtcccaggccatgataaacatgcaagtggaagctccttgcatga

SEQ ID NO: 94408 - DNA, 599 bp, Chicken  19866894472767_1
  misc_feature (1)..(37): n is any nucleotide
nnnnnnnnnnnnnnnnnnnnnnnnnnnnnnnnnnnnnatgttggaaattttatacatctgaagtaaatgcttgcctccctgatccgtcccattctggtcaggctttctgggacatgctgcagcagcacaggaagatcagaataaaagagaggagaaaatttggttttatttcgcactgatgaactgacctttagctacaccgctcctctattcttatctttaaaggtggtatacaggcaaaagtagctgccttgatacagctgcacagatgttcaaggaatgcattcagatgctcaatcrtggaagtaaagcaaatgcacagatcaccattgaaaagtgaccctgctaagctcatataggtggggggcaaaataacaacaagcacaccaacccccccagttctgacacaccattattttcatcttcagaagtatcagaaagtgcaaattaatggcatgacgtgcgtccgtacttctagtgttcataaaaattcacttcacaaaatacccctagaagataccatctaaagaactcctttattctcacgttttttttcttgaggtagcaggaggcaggatttcctacacattacataagga

SEQ ID NO: 94409 - DNA, 600 bp, Chicken  19866894472771_1
tatactctgaaaactgccagagagatagaggaaagagcaaagtaggttaatattcactcagttctgtctgaatgtggggagttagaagagattttctgaattctcttctgtgctttcccagatctaagatcagccacaccatgaaatttcaactcctaccatgctttcattgtaatgaaacagccatcagtcaataaaaattcttgaagcacactttcaaatactgaaaagcaagcaaacgctaagtcatctgataaaagcaggtcttagaatgaacgaagttgtgctcatgtcagactyagaataaacttctcataagcatatggaggaggtacaggggaacagcagaaatctgtaaagttcagtttcacattgaggctaatgggactgatatgattcacactgaaagaccttttagtccagtaaccctcttggcaaagaatagaagcttaaagaactacaagatactttcagttgttctatcctggtttcttgtcaacacgtagtttaggaatctctgtggtcaaaagcttggcatagaccaccttgtgaccactctgaacacatcaaagtttctttagcgcccaaaacattttgaac

SEQ ID NO: 94410 - DNA, 600 bp, Chicken  19866894472773_1
gattaggatagaaaggagacaacaggagaatgaaaaaggattggataggagctaattacagctgaattttcatcatcatcctttccgtggcacaacagtaatgttctgagcttcaggatttcttccttacggtaattctttcctgtcaatttgtggatatggtgcagcttactgggattctgaggacgatgttttgctgagggatgtgtgtcgttccccagcactcggttatagtttggggaacttaatcataagaatcatttgcataagtgcactgcaaaacaagtgctccttaaaacrgcctggggtaagatagctgtgtgtttaattcactgctatttctttttctgtattataacagatcatttggcattgtgcagtttttttcttgcttactgtcagtgattctaacaacatattttagcgcataaagtgctgaatagaagagtataaaagaggcttctcagagctttgatgttacaagaaaacaggttaaagtcctatcagctctcagtgtatggtctaatacaggaggaaacaaagaagtggaaagcaggttctagaaaaaaaaccttcgatgccactctgactctcttgcta

SEQ ID NO: 94411 - DNA, 599 bp, Chicken  19866894472774_1
  misc_feature (1)..(168): n is any nucleotide
nnnnnnnnnnnnnnnnnnnnnnnnnnnnnnnnnnnnnnnnnnnnnnnnnnnnnnnnnnnnnnnnnnnnnnnnnnnnnnnnnnnnnnnnnnnnnnnnnnnnnnnnnnnnnnnnnnnnnnnnnnnnnnnnnnnnnnnnnnnnnnnnnnnnnnnnnnnnnnnnnnnnnnnnccagcatcacagcatgctgcagaccactgtgtgtggccaaggacctctcccaagttaaggctcttggcttttagcaaaaacaaacaaacaaaaaaaaccctagttcctcacttgaactttatttatattaartgcattaaattcagtcccctggactatctcaagcagttaaatatctcgagcataacagatcggtaataaagattcaagtataaacatcggtctctgttttacccacaacgacactggrtaaaattctttctcttcttcaagcactctgtcttaattgttcactcctaagtaaatgagaatcaccgtcccctcattcccttcatcacaaaaagacaaaagcatatcctcctggaagggcacttggccacgcatgtgctgataatgcacttgggatgagcacacactcataagcatttagc

SEQ ID NO: 94412 - DNA, 599 bp, Chicken  19866894472774_2
  misc_feature (1)..(50): n is any nucleotide
nnnnnnnnnnnnnnnnnnnnnnnnnnnnnnnnnnnnnnnnnnnnnnnnnnccagcatcacagcatgctgcagaccactgtgtgtggccaaggacctctcccaagttaaggctcttggcttttagcaaaaacaaacaaacaaaaaaaaccctagttcctcacttgaactttatttatattaartgcattaaattcagtcccctggactatctcaagcagttaaatatctcgagcataacagatcggtaataaagattcaagtataaacatcggtctctgttttacccacaacgacactggrtaaaattctttctcttcttcaagcactctgtcttaattgttcactcctaagtaaatgagaatcaccgtcccctcattcccttcatcacaaaaagacaaaagcatatcctcctggaagggcacttggccacgcatgtgctgataatgcacttgggatgagcacacactcataagcatttagctatatgatgccaaacaacagagaagatgcgtggctgtgcacagagaaacaggcaaaggtaacacagatcactgtcagcagggtgagctttgtagagctctgcagagctggaagagctc

SEQ ID NO: 94413 - DNA, 503 bp, Chicken  19866894472775_1
catttgtttagtgcctctttttaatatgacatttcaactccctttcttacaattcagagaaaacatacagtataatcttaatcccattacctacagttaatggcactagttttcccacctggcaggacgcacacactagtttctcaccttcatctgacaggtaattcaagttttgtacatttgtgtataagtaggttcctctgtctattctgtttcagatatgcaccatgaccactagcagtaacatctacataatctcatactgtctacgtcaggcatttttccagtggtagtcagcartggcacctgcaaagtgattcaaggcataagacaagtgacagtgacagtgttttctttccaaagtgacaacctcaccactatccaaacagaatatatgagggcataaattgcctttattacactacaaatgcaagtctatctggggaggtttgggaactgacaaaagcagagcaccgtcacataattaaaatacaatttcaaca

SEQ ID NO: 94414 - DNA, 600 bp, Chicken  19866894472795_1
tcttcaaaaaaaagaactggatcccttctgcatttctgtagtcggtcagttcctctcttcctctttgcctttttttaatgggtagcagaaccctgtaaccttcagttctctgtttcttggaagacaaccatctatgtcctgcctctcacttcacttttttatttttattgccccaatatattttcaacccaagcgtgcaaaaaagagaatggatcagagaaagcagctcttgtccaaatgtggccaagcctggcctgctgctttatgcatctcctctaatcatgactgctgctgttgttrtcttaccttttacgctcagtagctcaaagcaagttttattgctggagatgaaagagtttggagatggaggggagagccagagagaggtagaaaagggagatggctcaggaaaaggagagtgggagcacaaggatgggatgttactgggacttctgtctcttttcaagcgtaaatctgtagtttcctgatggataacaggtgtgtgggaacaaaagtagttctgtagggatgttgccagtttgggtttaactagaggaatgcaggattggaaagaagaggctagccccacaggtccagtcc

SEQ ID NO: 94415 - DNA, 600 bp, Chicken  19866894472797_1
tccgaataatttggattgtgttagattaataaataggtaaagagacctaccaggtctggtaactgaaggtcagtatggcataatttcttcctgctgctgctgagtgttagacacagctttaaacacaaggggaccccagctcacctggtttccaggtgctatcgcagtgccatagcagcttgattcagctgccgttcaggttaagttacgctggctcacaagtttgcagaagtggggctgtttatcccattatctttgggattccttgttgtggtgtaaattcaggaagcctgtacggartgcagtagtgctgggactgggagaacatatgctctgtatctgtgtggtattaattatgcgttggctattagaggactggaggagacagaaggcagcagatcactggagacacatgtagcagccataagcccccactgaaatactatcttcagcttggatttaacatccttcgtctccatagctacaaggttccacttgtgaaaggacagatatgcactgtgcagtacttaggaatggtaagaaaaaaatccctgtagtatcttcagcagtggaaaggcttaatgttgcagtgaggggagg

SEQ ID NO: 94416 - DNA, 600 bp, Chicken  19866894472799_1
tcctttgccaaaggacctaaaccttgatgagtggacaaccggtccctacttcctgcctgcatctgaagaagaacatattgaatctaactctagatttataatctttccattaattggactttaatctgcagtcttttcaatcacaatcggatgcaacttgtacagactgctcatttatattcaagttcataaaatagttggcacacgcaataaccaccacagtattccaagatatatccgtgctcctctagccatgctgatggcactcctaggaacacttgggtagtaatgactaaaacmacatactcctacaacttcaaataactgaagaagtacagtgcctacagactgactactactacaacttctccaccccttgccctaagaagaggatggggtcaatggtaaatttgcccttctcagccaccaaaagtcataacatatatatccatgaataaaggcagaaagggaagagacctccatcaaggttaaagtacaatgaagcaatacacagactagcaaaatccgttagcaaaatacaatgttttaaaagacattaacatacaccatctttcttatcaccttaccatgctggtgcct

SEQ ID NO: 94417 - DNA, 600 bp, Chicken  19866894472802_1
atatcattagacagtatgtataattgttttaatctaatggtttatcacaaaggtttgaataaacttgtgatggtaagggaaagggctaaaggtctaaaggcaagcacatatctgtcttcaaatacaggaaaaattgctggagtgacgtagagtctgtgctccgtggtcatgataatatgtgttatgtgtattaagttgcaacattgaaaatgcaacttagaaaagcttctacaagttaataactgtgatagttgagtatgcattacccaagacatcattagtaaggatatttttaagtcraatatgatcagtcctgtctttggaaagagagaggagaaatgaatcatctcttgaaagtttttcatttctttgtgttctttttctgcagctatgatgaaatttttgtgaatatctaaatatatatatggaaacatatatgtttccatacatatatgtgtatcagacaaatgttgcataaagattttatatatatataaatttatgtaaatatatgtatgtatgtatgtttgtatgtttttacgtacatacatagaaggggctgctctgaaactaatgtctcctattttattatgttggccc

SEQ ID NO: 94418 - DNA, 600 bp, Chicken  19866894472825_1
tgattttaatttatatttgatgtctctcctgtttttctgcagacttggcattcctcagtgcagccgctgactgtttctctgactgattcatggaagagtataaataaccagggcaatgcatctgcacttatgctaacagtaggggagtttgcataggtgacctcagtgccttaaaacctgagataaatataaaatcatgacaattatttcaatcccttatataggtacaaccatttggtactgggcagagtgctttgcattcctctgtttgtccagctgttaattaccaggtaatgaaaytctcccttagctgaaaaatcagtagtactggctgcttctgattgctcaagtgacatctaggtactatccaagccaacgcaaaattcatgcccaactcagtacgcttatttgtggttcagtgtatatgaagctatagattgcaaaaggcctcagccctgtgtcaccaataggcatcaggggattcataatgaccctttgcttttctttggctgctcttggctcctgtttcttcagcaaaacacaactcttctgctggatgccgcagggtacctaaaggcatggtgtgaagagcaagttctc

SEQ ID NO: 94419 - DNA, 600 bp, Chicken  19866894472827_1
caagttcttgaatggggtttgggtagcacctgtgcctgagcacttggctctgaaaagggatgtttcatcctgatggtgtatggggtgaatgtgggacaaagggttagaaggtacagtggacagaaaaattcgtggaactaacattgctgaacaaacatttaaataaccctgctgtgattttatacaggtggagatcatcagtcaggggtaaatgacctgcggttcttcatgtctgcattttctgctgactgcagcaatactttggtgcagaacagagctgtctttctagtttttcaaccygtcttgctcacagcacctrctatacaaaactagccagtacccactcaaaccctaagagataagtggcaggtgtctggcaaagtttagcgtacctcagacagcataggagcatcatagatcagaggagccttggaaaatccatcaggataggtagggaactagacacgatagtacataataaaaagcttgagtaaattgggtttgttaagccagggagagttgcgtatagatctttccacaaggaaaattccaaggggatatgacaaatttttagctgtgagcatgctaaaacacagccac

SEQ ID NO: 94420 - DNA, 600 bp, Chicken  19866894472827_2
tgggtagcacctgtgcctgagcacttggctctgaaaagggatgtttcatcctgatggtgtatggggtgaatgtgggacaaagggttagaaggtacagtggacagaaaaattcgtggaactaacattgctgaacaaacatttaaataaccctgctgtgattttatacaggtggagatcatcagtcaggggtaaatgacctgcggttcttcatgtctgcattttctgctgactgcagcaatactttggtgcagaacagagctgtctttctagtttttcaaccygtcttgctcacagcacctrctatacaaaactagccagtacccactcaaaccctaagagataagtggcaggtgtctggcaaagtttagcgtacctcagacagcataggagcatcatagatcagaggagccttggaaaatccatcaggataggtagggaactagacacgatagtacataataaaaagcttgagtaaattgggtttgttaagccagggagagttgcgtatagatctttccacaaggaaaattccaaggggatatgacaaatttttagctgtgagcatgctaaaacacagccacatgttgcccagaggggtag

SEQ ID NO: 94421 - DNA, 599 bp, Chicken  19866894472837_1
  misc_feature (1)..(163): n is any nucleotide
nnnnnnnnnnnnnnnnnnnnnnnnnnnnnnnnnnnnnnnnnnnnnnnnnnnnnnnnnnnnnnnnnnnnnnnnnnnnnnnnnnnnnnnnnnnnnnnnnnnnnnnnnnnnnnnnnnnnnnnnnnnnnnnnnnnnnnnnnnnnnnnnnnnnnnnnnnnnnnnnnnncgtacaaaaaagtacatccgaactcttggttgcaggggtgcaaatcgctgaatgtcatttgcatagttgccgtgcagttagatgctctcaagggtttgctttaatcattcagaaatgcttattgttctctgaacaaygagaaacatgacttgcctgaaaagaaatttgcttcttgtgctgtagggtgaattttttatttattgggagagacatgtttgcactgagttttttgcatgaaggctggtgargaaaaaccacaccagaaagcctgcacctgcaatagtatcctggtaaattgaccacataaargcatgggaccaaaaatatctaggaaggttcagtgtatgcactggaagaagaaaaaaaaawtaaagctaaatccagayttttctaggaatatttgcatcatataacagttgagtaaacagaataaggg

SEQ ID NO: 94422 - DNA, 599 bp, Chicken  19866894472837_2
  misc_feature (1)..(52): n is any nucleotide
nnnnnnnnnnnnnnnnnnnnnnnnnnnnnnnnnnnnnnnnnnnnnnnnnnnncgtacaaaaaagtacatccgaactcttggttgcaggggtgcaaatcgctgaatgtcatttgcatagttgccgtgcagttagatgctctcaagggtttgctttaatcattcagaaatgcttattgttctctgaacaaygagaaacatgacttgcctgaaaagaaatttgcttcttgtgctgtagggtgaattttttatttattgggagagacatgtttgcactgagttttttgcatgaaggctggtgargaaaaaccacaccagaaagcctgcacctgcaatagtatcctggtaaattgaccacataaargcatgggaccaaaaatatctaggaaggttcagtgtatgcactggaagaagaaaaaaaaawtaaagctaaatccagayttttctaggaatatttgcatcatataacagttgagtaaacagaataagggagactgaactaattgaagaagcagccattctgaacaccacctccctgttgacaccatcagcaagcagctacacagggagaagccataataatactgtgtttgtttggcacg

SEQ ID NO: 94423 - DNA, 600 bp, Chicken  19866894472837_3
aagtacatccgaactcttggttgcaggggtgcaaatcgctgaatgtcatttgcatagttgccgtgcagttagatgctctcaagggtttgctttaatcattcagaaatgcttattgttctctgaacaaygagaaacatgacttgcctgaaaagaaatttgcttcttgtgctgtagggtgaattttttatttattgggagagacatgtttgcactgagttttttgcatgaaggctggtgargaaaaaccacaccagaaagcctgcacctgcaatagtatcctggtaaattgaccacataaargcatgggaccaaaaatatctaggaaggttcagtgtatgcactggaagaagaaaaaaaaawtaaagctaaatccagayttttctaggaatatttgcatcatataacagttgagtaaacagaataagggagactgaactaattgaagaagcagccattctgaacaccacctccctgttgacaccatcagcaagcagctacacagggagaagccataataatactgtgtttgtttggcacggagtggtgtccatatatgttcacatcctaatcgccggagcaatcrttgttgctcgcagctcc

SEQ ID NO: 94424 - DNA, 600 bp, Chicken  19866894472837_4
ccgtgcagttagatgctctcaagggtttgctttaatcattcagaaatgcttattgttctctgaacaaygagaaacatgacttgcctgaaaagaaatttgcttcttgtgctgtagggtgaattttttatttattgggagagacatgtttgcactgagttttttgcatgaaggctggtgargaaaaaccacaccagaaagcctgcacctgcaatagtatcctggtaaattgaccacataaargcatgggaccaaaaatatctaggaaggttcagtgtatgcactggaagaagaaaaaaaaawtaaagctaaatccagayttttctaggaatatttgcatcatataacagttgagtaaacagaataagggagactgaactaattgaagaagcagccattctgaacaccacctccctgttgacaccatcagcaagcagctacacagggagaagccataataatactgtgtttgtttggcacggagtggtgtccatatatgttcacatcctaatcgccggagcaatcrttgttgctcgcagctccatttcatttccttggctgagcactcctgggattttggactgtgatctcattatttgcttg

SEQ ID NO: 94425 - DNA, 600 bp, Chicken  19866894472837_5
ctcaagggtttgctttaatcattcagaaatgcttattgttctctgaacaaygagaaacatgacttgcctgaaaagaaatttgcttcttgtgctgtagggtgaattttttatttattgggagagacatgtttgcactgagttttttgcatgaaggctggtgargaaaaaccacaccagaaagcctgcacctgcaatagtatcctggtaaattgaccacataaargcatgggaccaaaaatatctaggaaggttcagtgtatgcactggaagaagaaaaaaaaawtaaagctaaatccagayttttctaggaatatttgcatcatataacagttgagtaaacagaataagggagactgaactaattgaagaagcagccattctgaacaccacctccctgttgacaccatcagcaagcagctacacagggagaagccataataatactgtgtttgtttggcacggagtggtgtccatatatgttcacatcctaatcgccggagcaatcrttgttgctcgcagctccatttcatttccttggctgagcactcctgggattttggactgtgatctcattatttgcttggctctgccactcgttgt

SEQ ID NO: 94426 - DNA, 600 bp, Chicken  19866894472837_6
aaattgaccacataaargcatgggaccaaaaatatctaggaaggttcagtgtatgcactggaagaagaaaaaaaaawtaaagctaaatccagayttttctaggaatatttgcatcatataacagttgagtaaacagaataagggagactgaactaattgaagaagcagccattctgaacaccacctccctgttgacaccatcagcaagcagctacacagggagaagccataataatactgtgtttgtttggcacggagtggtgtccatatatgttcacatcctaatcgccggagcaatcrttgttgctcgcagctccatttcatttccttggctgagcactcctgggattttggactgtgatctcattatttgcttggctctgccactcgttgtattgtgtacctgctccagcagatatcatcaactcctaatacttctgtgccgcacagaacaaatcatttgcatttgagtaggtcgctatggctactggctacctgtgtgctgcatctgtacaagccaaaaactaaaggtgctccgcagaattcagacaaggatcaactgttcagtctttgagatcctatccacgcctgttgttattg

SEQ ID NO: 94427 - DNA, 600 bp, Chicken  19866894472838_1
actaaattatcctttgctggaattttagaggcaaagaatagaacagaatgggggaatgaacacatttccaagaataataataataaaaaagcagcaaacatatcctgattgctgtgaaatctgtatcaaattaaaaggatttccttctaagggagatcacatgagtgtgagctctttgagaacaggtaggctgaagaaaacataccaaagtaactcagtcgttaagcattcagcctgcccagcatgcacctggcagaagatttggaatagtaacatctggagaggtgatgcagggctggraacatctgtatgacctgtggtgttagttatgagggtattataatagttttattggttatatatgaattatwtatagtaaaatataatcagaaaagarggcagataaayagttatggccagtcccatctctgagtataactgtttctatctccagaaccattgtgccagagcaaccactgtgatactgggtgcgtccccatgagaaaagtgtgagaacaagaacgtacatccaacatgcagatgatcctgggttgtgagtttagttcacttagaattattgcatcttattgttttaatgtc

SEQ ID NO: 94428 - DNA, 600 bp, Chicken  19866894472838_2
gaataataataataaaaaagcagcaaacatatcctgattgctgtgaaatctgtatcaaattaaaaggatttccttctaagggagatcacatgagtgtgagctctttgagaacaggtaggctgaagaaaacataccaaagtaactcagtcgttaagcattcagcctgcccagcatgcacctggcagaagatttggaatagtaacatctggagaggtgatgcagggctggraacatctgtatgacctgtggtgttagttatgagggtattataatagttttattggttatatatgaattatwtatagtaaaatataatcagaaaagarggcagataaayagttatggccagtcccatctctgagtataactgtttctatctccagaaccattgtgccagagcaaccactgtgatactgggtgcgtccccatgagaaaagtgtgagaacaagaacgtacatccaacatgcagatgatcctgggttgtgagtttagttcacttagaattattgcatcttattgttttaatgtcaaccccctggtacagacagaagcagtgatgtttatactgcgatatcaaacagtgccctttctcctccactc

SEQ ID NO: 94429 - DNA, 600 bp, Chicken  19866894472838_3
acatatcctgattgctgtgaaatctgtatcaaattaaaaggatttccttctaagggagatcacatgagtgtgagctctttgagaacaggtaggctgaagaaaacataccaaagtaactcagtcgttaagcattcagcctgcccagcatgcacctggcagaagatttggaatagtaacatctggagaggtgatgcagggctggraacatctgtatgacctgtggtgttagttatgagggtattataatagttttattggttatatatgaattatwtatagtaaaatataatcagaaaagarggcagataaayagttatggccagtcccatctctgagtataactgtttctatctccagaaccattgtgccagagcaaccactgtgatactgggtgcgtccccatgagaaaagtgtgagaacaagaacgtacatccaacatgcagatgatcctgggttgtgagtttagttcacttagaattattgcatcttattgttttaatgtcaaccccctggtacagacagaagcagtgatgtttatactgcgatatcaaacagtgccctttctcctccactcctacccttcctcaccaaaacactgga

SEQ ID NO: 94430 - DNA, 600 bp, Chicken  19866894472838_4
ttgctgtgaaatctgtatcaaattaaaaggatttccttctaagggagatcacatgagtgtgagctctttgagaacaggtaggctgaagaaaacataccaaagtaactcagtcgttaagcattcagcctgcccagcatgcacctggcagaagatttggaatagtaacatctggagaggtgatgcagggctggraacatctgtatgacctgtggtgttagttatgagggtattataatagttttattggttatatatgaattatwtatagtaaaatataatcagaaaagarggcagataaayagttatggccagtcccatctctgagtataactgtttctatctccagaaccattgtgccagagcaaccactgtgatactgggtgcgtccccatgagaaaagtgtgagaacaagaacgtacatccaacatgcagatgatcctgggttgtgagtttagttcacttagaattattgcatcttattgttttaatgtcaaccccctggtacagacagaagcagtgatgtttatactgcgatatcaaacagtgccctttctcctccactcctacccttcctcaccaaaacactggaagttcagggaa

SEQ ID NO: 94431 - DNA, 598 bp, Chicken  19866894472845_1
gtggatgtgacctttggtccttttaacaggaattgcaccaaacgtaccagattacggcagtaaagcgctgagtttctggagctgaattgtgcatatctgtaggacagcaacagaggcagccaccacttcactacaggccagaaaacagaaacatagagctatttcaggacacttcaagaaaggttgatgtggcaaagggtggatctccacaaattgctcttgaacccacaacaatgcctctgtaagtcccatcagagattagacttttgccattcaagtatataactttaaaagacaacrctttcagaaaccgattttttttcagactaagtattttaccagtcttttgccagttgacaaagccacctatttttcatatgttgagaagctcatcacatgccatcagtgtacaaaacttcctgaaggaaaaggtgcttcatcaatcagcataactcagctgtaaatttggaacccctaatgtgagcaagctgttgattttagatttacagagcaatctcaggactcttcagctcctctggttacacagaattcttctctctcagatcactccggtcaaatttcatccaaaatgcagaaa

SEQ ID NO: 94432 - DNA, 600 bp, Chicken  19866894472850_1
tcttttaagtttaatttgcagagtactttatacgttattgtttgaacagatgcactgtatttgctgttttactacatacctataacacacattttcgcatacgctctctgaaaggtaactatcttccacaataaaatagttggcacttattctttgtccaaaatggtcaacaactgctttgcatctgttaaaaaaaaattcaaaccaaattaataaattcagacaaagtaacaaaaagtacgcatgttttaagtaagttatagagaacattatttatatctgtcaaatgaattacctgtmcatttttaccacgtgaacccctgtaacaattgataaagaaatcctatacttatatgttctacatggtatatacaagttttacgtacatgttagaatattaataaatttgtgattttataaggaaaacggacttaaattaacaacactgccatttgactgtgcatgaaaatagcatatatttcacactttacattacatggaaaagtcatactctgaatgattttgtgggtgttaccatcatggtgttattttccccccattgcacattattcccctatcagtaaatatcatgacatgcat

SEQ ID NO: 94433 - DNA, 600 bp, Chicken  19866894472850_2
ctctctgaaaggtaactatcttccacaataaaatagttggcacttattctttgtccaaaatggtcaacaactgctttgcatctgttaaaaaaaaattcaaaccaaattaataaattcagacaaagtaacaaaaagtacgcatgttttaagtaagttatagagaacattatttatatctgtcaaatgaattacctgtmcatttttaccacgtgaacccctgtaacaattgataaagaaatcctatacttatatgttctacatggtatatacaagttttacgtacatgttagaatattaatmaatttgtgattttataaggaaaacggacttaaattaacaacactgccatttgactgtgcatgaaaatagcatatatttcacactttacattacatggaaaagtcatactctgaatgattttgtgggtgttaccatcatggtgttattttccccccattgcacattattcccctatcagtaaatatcatgacatgcatgttgcgccttatgaataaacattattgtaacttatgtgatcaagaccatctatacaactagagaagatgagaatcaaatctagaaaagtaacagcagtcagct

SEQ ID NO: 94434 - DNA, 600 bp, Chicken  19866894472850_3
ggaaaagtcatactctgaatgattttgtgggtgttaccatcatggtgttattttccccccattgcacattattcccctatcagtaaatatcatgacatgcatgttgcgccttatgaataaacattattgtaacttatgtgatcaagaccatctatacaactagagaagatgagaatcaaatctagaaaagtaacagcagtcagctgtcaccagctttagcagggttaggatttcaccagtgcttcttctagtcagaaatgaaaacctaagaatggtggaggcagtacttatataacaacrtaagaagttaattacaagtaagcacgcttatgatgctaacttctgatgtctgtttcataggaatctgcatgttacatatacatctatattcaaatgtaacagaaaacttgcaaagtggtaattaaaaaaatcaaatggtgttagtattgtttaactttaaacatgcagtacttttcacagtttcagtcacattctgttcaacacgtgtttgcattccacttgcaactttttatgttttttaaagttttttcttaatttaacctgatttctttcacaagcactcatttgaatattgcaaat

SEQ ID NO: 94435 - DNA, 599 bp, Chicken  19866894472851_1
  misc_feature (1)..(122): n is any nucleotide
nnnnnnnnnnnnnnnnnnnnnnnnnnnnnnnnnnnnnnnnnnnnnnnnnnnnnnnnnnnnnnnnnnnnnnnnnnnnnnnnnnnnnnnnnnnnnnnnnnnnnnnnnnnnnnnnnnnnnnnnnnttttatgaaagggatcattaattataagccattaaattttaataggaggcttctttttcctgatatcttgcatgagccaagatcaaagtaactcccatatgttgacctagtaagcatgctaactgagaagattagcttctctgtcctttttaaaatcagataaatcacaccagtgacrtgcaataggagagtggccatttcagtgtcatatgtgtaacaatacaacatggataaatgacactactcactcatgaaaggacagaactgggttctgccagctatggttatgcatattcaaaacagctagaactggggttcctaatgctttatcaaaggtgactaagactcatactttgtacattcagtttgactgctgtggtttgataagttgcctggttgtactcagccttttataacataggcactggttttcttccatagaacataagccacaaaccatgttccagtcattaatta

SEQ ID NO: 94436 - DNA, 600 bp, Chicken  19866894472853_1
aacttttgcaagctgacaaaagagctgtaccaatacattaatttaattcccatctttagtgaaaggttctggaggagtgagtccaagatccccactgagggtatctgacatgtggctgtgtgatgctccttgctgcaaattcaagaactgagatgttcttggcatataacttgctttcctatttcatattttaaaactctttcataaggagtaatatgtgctgtaggacttggggtcagtggagctgaaatgatacacggcatgagtagctggagtgaaagaatcaggggaaaaacacaycgccttccctgggggctttgaatgtaatctctgacttctgtcctggaaagaaaatggtgctgtgtgaaggtgcrggggcagcttctcccagaccatcacttactgataccgaaataatctcaggcagcacaaactctccagtactgctgcttctccttttggggatatacctgccagatgttgaggcattgtgtaattttaacaagctaattaagggagatcattaaattcagaatgggtcctagacttcagaagataagtcagtgtggataggtcttgggtatcttcatccctgagtta

SEQ ID NO: 94437 - DNA, 600 bp, Chicken  19866894472853_2
gagtgagtccaagatccccactgagggtatctgacatgtggctgtgtgatgctccttgctgcaaattcaagaactgagatgttcttggcatataacttgctttcctatttcatattttaaaactctttcataaggagtaatatgtgctgtaggacttggggtcagtggagctgaaatgatacacggcatgagtagctggagtgaaagaatcaggggaaaaacacaycgccttccctgggggctttgaatgtaatctctgacttctgtcctggaaagaaaatggtgctgtgtgaaggtgcrggggcagcttctcccagaccatcacttactgataccgaaataatctcaggcagcacaaactctccagtactgctgcttctccttttggggatatacctgccagatgttgaggcattgtgtaattttaacaagctaattaagggagatcattaaattcagaatgggtcctagacttcagaagataagtcagtgtggataggtcttgggtatcttcatccctgagttacagctgttgatcccaggtttgtccaagaaggagatgcttacaattgctttagaagtctgagtcttggagtctgg

SEQ ID NO: 94438 - DNA, 600 bp, Chicken  19866894472854_1
tatgaaagaagtaccaagagagagaggttttggcccagagtttcagggttcttggtacataaaagcttggctagggttgtggaaaagcaaaggcagtacaaagacattcctggacctctttcaaaagcagttgctattagtcatctagggcaagctgttgaggagacatagggtaggtttttggtcagacaagttgggattgttcaataattaacagcagtcagcaaactgtgagtcagttgttacactactaagaggttttgtgttcaattatgtgttcctcatcacatcctgaagtgycaagcatcacgtgctcttatmtagctgccaaaatwatgattccttcccttgccgtcagaagtattattttgcaacacagacatrgaaagctgaagaggggccttgtccagctctgagatttggctgtagaggttgggaaccttggtaagaaaatgcaacagcccaatagaatgtaattttatctaaggcttcttgcctaggtaagcaaaggcagtcagccatgttagcggatcatgcagtatttttctgtactcactacagtaggatggcaatctggcctttacttggcaggtgcaaggc

SEQ ID NO: 94439 - DNA, 587 bp, Chicken  19866894472854_2
gagaggttttggcccagagtttcagggttcttggtacataaaagcttggctagggttgtggaaaagcaaaggcagtacaaagacattcctggacctctttcaaaagcagttgctattagtcatctagggcaagctgttgaggagacatagggtaggtttttggtcagacaagttgggattgttcaataattaacagcagtcagcaaactgtgagtcagttgttacactactaagaggttttgtgttcaattatgtgttcctcatcacatcctgaagtgycaagcatcacgtgctcttatmtagctgccaaaatwatgattccttcccttgccgtcagaagtattattttgcaacacagacatrgaaagctgaagaggggccttgtccagctctgagatttggctgtagaggttgggaaccttggtaagaaaatgcaacagcccaatagaatgtaattttatctaaggcttcttgcctaggtaagcaaaggcagtcagccatgttagcggatcatgcagtatttttctgtactcactacagtaggatggcaatctggcctttacttggcaggtgcaaggctagcagag

SEQ ID NO: 94440 - DNA, 573 bp, Chicken  19866894472854_3
cagagtttcagggttcttggtacataaaagcttggctagggttgtggaaaagcaaaggcagtacaaagacattcctggacctctttcaaaagcagttgctattagtcatctagggcaagctgttgaggagacatagggtaggtttttggtcagacaagttgggattgttcaataattaacagcagtcagcaaactgtgagtcagttgttacactactaagaggttttgtgttcaattatgtgttcctcatcacatcctgaagtgycaagcatcacgtgctcttatmtagctgccaaaatwatgattccttcccttgccgtcagaagtattattttgcaacacagacatrgaaagctgaagaggggccttgtccagctctgagatttggctgtagaggttgggaaccttggtaagaaaatgcaacagcccaatagaatgtaattttatctaaggcttcttgcctaggtaagcaaaggcagtcagccatgttagcggatcatgcagtatttttctgtactcactacagtaggatggcaatctggcctttacttggcaggtgcaaggctagcagag

SEQ ID NO: 94441 - DNA, 524 bp, Chicken  19866894472854_4
aagcaaaggcagtacaaagacattcctggacctctttcaaaagcagttgctattagtcatctagggcaagctgttgaggagacatagggtaggtttttggtcagacaagttgggattgttcaataattaacagcagtcagcaaactgtgagtcagttgttacactactaagaggttttgtgttcaattatgtgttcctcatcacatcctgaagtgycaagcatcacgtgctcttatmtagctgccaaaatwatgattccttcccttgccgtcagaagtattattttgcaacacagacatrgaaagctgaagaggggccttgtccagctctgagatttggctgtagaggttgggaaccttggtaagaaaatgcaacagcccaatagaatgtaattttatctaaggcttcttgcctaggtaagcaaaggcagtcagccatgttagcggatcatgcagtatttttctgtactcactacagtaggatggcaatctggcctttacttggcaggtgcaaggctagcagag

SEQ ID NO: 94442 - DNA, 600 bp, Chicken  19866894472855_1
tagtgaaatacactgtatacacaacctttgtctttgaagaataaaaataattttcaggagttggcttgtgcaatgctgttcaagcactcatccatcgcttatgttctacaagaatggctgctaatttggttgtcacagcaaccgtatctcttgcttccatattttcttcctcaagcccaattcgtttataaacctcaaagttgtttcatgttcctatgttaacatcataaaagaaatacacgtttctggccagctaaagaacaaataaatgaagaaaaaggaaaagagcagcaacttacwttagaaaacattttgaatttttactaaactacctaactagtaataaatatatatatatttatctttataattcatactccaattattgtctgggaaaatgtatcatttcaaatgactactaataacttttcaaattctaaattttaaagcaagaaaaagtagccttactgtaagtttctcttgtactgatatgcaactgtgtcatataaggactgcccataaccattcaaaggtatggtgtcatcaaatccagtatcccgtcttcaatgtgggctaacagcagttccttcgagtcacaac

SEQ ID NO: 94443 - DNA, 600 bp, Chicken  19866894472862_1
ctgcacagtaacttttctccatctgtactggaatgtagttaacaaaatgtgcctccagatataaatctgattttcatgtataggtttgactggaaggcctatgatgggttaatgaaatattgtgtgtagttgagggtatttggagaatttaaagcagagatcacttcagagtttagggagctcttgagttctatctggtgattgaagtcaccttctctgtgacaacctgacagctctgacagcttttgagactgtatgagcttcagtagagctagtgcagaaacaggatgtacaaaggaraagaactagacaagaggaagatactctgtattagctgaacgtatcccaatctcacagccatctgcatgtgatcagtaagcggtaatctcatgtatgtttgtcgtgatgaatcagtgtggtgggatcaacctagcaaacagtgggcatgaagtaacttttagcagggtatataaagcagttccatcactgtgtgtggaagagcttatggaattctcacattttgaaacagtaaacataatagtaaacactgtactcccagtttctgcctattcaaatccttgcagctattaaacatagaat

SEQ ID NO: 94444 - DNA, 599 bp, Chicken  19866894472869_1
  misc_feature (1)..(228): n is any nucleotide
nnnnnnnnnnnnnnnnnnnnnnnnnnnnnnnnnnnnnnnnnnnnnnnnnnnnnnnnnnnnnnnnnnnnnnnnnnnnnnnnnnnnnnnnnnnnnnnnnnnnnnnnnnnnnnnnnnnnnnnnnnnnnnnnnnnnnnnnnnnnnnnnnnnnnnnnnnnnnnnnnnnnnnnnnnnnnnnnnnnnnnnnnnnnnnnnnnnnnnnnnnnnnnnnnnnnnnnnnnnnnnnnnnnnttttgtcctagaatgtattctgcctcatttctcatccttttaacagatgttagatgcagtgtcacatcaagwcctgctgtgtattggagaatctcagctttcgttcagtaatattttagtctgsgttgtcttaggagggcagcaatactagaagattatcaaaagctattaaattaacatatttttccccaggtttttaatcccagagtcatgtttactacttagagtaagcagtaatatttgctactccaatgctttccaacactgcacatgatggcactaagtactgagataagatttattgtccaggcatctataaataacaatattcaactattgactaaatactttcatattataaaagtaataca

SEQ ID NO: 94445 - DNA, 599 bp, Chicken  19866894472869_2
  misc_feature (1)..(176): n is any nucleotide
nnnnnnnnnnnnnnnnnnnnnnnnnnnnnnnnnnnnnnnnnnnnnnnnnnnnnnnnnnnnnnnnnnnnnnnnnnnnnnnnnnnnnnnnnnnnnnnnnnnnnnnnnnnnnnnnnnnnnnnnnnnnnnnnnnnnnnnnnnnnnnnnnnnnnnnnnnnnnnnnnnnnnnnnnnnnnnnnttttgtcctagaatgtattctgcctcatttctcatccttttaacagatgttagatgcagtgtcacatcaagwcctgctgtgtattggagaatctcagctttcgttcagtaatattttagtctgsgttgtcttaggagggcagcaatactagaagattatcaaaagctattaaattaacatatttttccccaggtttttaatcccagagtcatgtttactacttagagtaagcagtaatatttgctactccaatgctttccaacactgcacatgatggcactaagtactgagataagatttattgtccaggcatctataaataacaatattcaactattgactaaatactttcatattataaaagtaatacacagcttgtggggctgctcaattaaggaaaattagattacatcatcctagtat

SEQ ID NO: 94446 - DNA, 600 bp, Chicken  19866894472893_1
acaaattcagggatcagagcaacactctattctacaccttttgtcactgtgttatacactctggtcataaatacttcaaaaactgtgtagtaaatgttgtttgcttaaattccctctgaaagtaagatttttatagttttgattatatcttgtagacatcttttcatcctgaataaataaaaaaataataagcaacctaaaaccacttcaaaaaattctagataatatgaattatagtctacagaccttaaaagaattgagagaaaaatcttatcaggaattgattttattttatcgtayttcatttcatttattcttttacgctagatctttcttaaaaccttaaatgacagagaacttgtgagcttaaaagtgtatgtaaatagtgcaccttgcaaatttgttaatgctgacttrtgaagaaaaaggctattaagagaataaaagatataaaataaataaagtgtgaaaaaaataacytttatacgtaaaaaaggatttttaaaataattcaaaatatgtttacagcaaacagcaaatgcttgttttttaaagttgacattacagagatttttaggaatgatccacatttctccagta

SEQ ID NO: 94447 - DNA, 600 bp, Chicken  19866894472893_2
gaaagtaagatttttatagttttgattatatcttgtagacatcttttcatcctgaataaataaaaaaataataagcaacctaaaaccacttcaaaaaattctagataatatgaattatagtctacagaccttaaaagaattgagagaaaaatcttatcaggaattgattttattttatcgtayttcatttcatttattcttttacgctagatctttcttaaaaccttaaatgacagagaacttgtgagcttaaaagtgtatgtaaatagtgcaccttgcaaatttgttaatgctgacttrtgaagaaaaaggctattaagagaataaaagatataaaataaataaagtgtgaaaaaaataacytttatacgtaaaaaaggatttttaaaataattcaaaatatgtttacagcaaacagcaaatgcttgttttttaaagttgacattacagagatttttaggaatgatccacatttctccagtagtgtcgccttagttctttcaattcatttatctttatgcttatctcatatttgaaaattacactgcatgaaaatgatagcccatcacatttttgccctataataaaaaaagtaagttt

SEQ ID NO: 94448 - DNA, 600 bp, Chicken  19866894472893_3
aaaaataataagcaacctaaaaccacttcaaaaaattctagataatatgaattatagtctacagaccttaaaagaattgagagaaaaatcttatcaggaattgattttattttatcgtayttcatttcatttattcttttacgctagatctttcttaaaaccttaaatgacagagaacttgtgagcttaaaagtgtatgtaaatagtgcaccttgcaaatttgttaatgctgacttrtgaagaaaaaggctattaagagaataaaagatataaaataaataaagtgtgaaaaaaataacytttatacgtaaaaaaggatttttaaaataattcaaaatatgtttacagcaaacagcaaatgcttgttttttaaagttgacattacagagatttttaggaatgatccacatttctccagtagtgtcgccttagttctttcaattcatttatctttatgcttatctcatatttgaaaattacactgcatgaaaatgatagcccatcacatttttgccctataataaaaaaagtaagtttaacttgtgatgctgatgttgataaaggggtcaaactgtatgtcatttacaartaataattaaa

SEQ ID NO: 94449 - DNA, 600 bp, Chicken  19866894472893_4
aaaaaataacytttatacgtaaaaaaggatttttaaaataattcaaaatatgtttacagcaaacagcaaatgcttgttttttaaagttgacattacagagatttttaggaatgatccacatttctccagtagtgtcgccttagttctttcaattcatttatctttatgcttatctcatatttgaaaattacactgcatgaaaatgatagcccatcacatttttgccctataataaaaaaagtaagtttaacttgtgatgctgatgttgataaaggggtcaaactgtatgtcatttacaartaataattaaacctacaataatatctatccaaaatgataaattctttatcatacagacacttaagcacaatggaaggtataagtacaaagatcttagtcaaagtctgatgaaaaatcaatggaagaacacatttgtgctcaacaacactgaattgcaccatgatagttgcaaaaacacaagaaagatcatagtacacccttcagcacagtgtaaattcacctgaactacattcagaagagcttgcatgagcattcagagtggtctggcagtaacagcacaaaacaatatagcttgaaaaa

SEQ ID NO: 94450 - DNA, 600 bp, Chicken  19866894472896_1
aagtaccagctttcagggagtctagtctatggaatttctaggaagaaaacaaaagcttccaaaagattcttcatggaagaacaacagctgttagcgtactggaatagctatatctgcttgtctgcttggtgtaacagtacatctgatctctgttctgtgtgctttcccaggttgattaggatacagttaattactgtttcaatggcaagtctcgtttttcatgttttgaagcagataaccataattatagactagaaatgctatactgaagatgtagtgagtcctggtttctgttgtggyggactgcagcccttgcaatataggttacttcagttggaagggaacttcaaagatccagtccaactgcctgaccacttcaggactaactcaatgttaaagcatgttactgacagcattatctaaatgcttcytgaatgctgacagacatcagctgtttctctgtgaatcctgtctgtgtttaaccagccttactgtaaatgagtttttgatgtccagkctgaagcacagctttgtgctgctctgcttatcctatcatcagttaccagggaatagagactgcatcccttgggttcccctcag

SEQ ID NO: 94451 - DNA, 600 bp, Chicken  19866894472896_2
taacagtacatctgatctctgttctgtgtgctttcccaggttgattaggatacagttaattactgtttcaatggcaagtctcgtttttcatgttttgaagcagataaccataattatagactagaaatgctatactgaagatgtagtgagtcctggtttctgttgtggyggactgcagcccttgcaatataggttacttcagttggaagggaacttcaaagatccagtccaactgcctgaccacttcaggactaactcaatgttaaagcatgttactgacagcattatctaaatgcttcytgaatgctgacagacatcagctgtttctctgtgaatcctgtctgtgtttaaccagccttactgtaaatgagtttttgatgtccagkctgaagcacagctttgtgctgctctgcttatcctatcatcagttaccagggaatagagactgcatcccttgggttcccctcaggaagttgtcataagcaatgaggttgccccttgggcttctttcctccagattatacatcagttgagttgtctgatgacagagtatcacataggtggctaaactgctttgctcctacgtttgtaatgactgag

SEQ ID NO: 94452 - DNA, 600 bp, Chicken  19866894472896_3
ttcatgttttgaagcagataaccataattatagactagaaatgctatactgaagatgtagtgagtcctggtttctgttgtggyggactgcagcccttgcaatataggttacttcagttggaagggaacttcaaagatccagtccaactgcctgaccacttcaggactaactcaatgttaaagcatgttactgacagcattatctaaatgcttcytgaatgctgacagacatcagctgtttctctgtgaatcctgtctgtgtttaaccagccttactgtaaatgagtttttgatgtccagkctgaagcacagctttgtgctgctctgcttatcctatcatcagttaccagggaatagagactgcatcccttgggttcccctcaggaagttgtcataagcaatgaggttgccccttgggcttctttcctccagattatacatcagttgagttgtctgatgacagagtatcacataggtggctaaactgctttgctcctacgtttgtaatgactgagcaaatgtattgcctgttaggtgctctttccacaggaaatacttaagtctagtgactcagcacctatttgattttcttcttacaggg

SEQ ID NO: 94453 - DNA, 497 bp, Chicken  19866894472898_1
gtaaagtaccacttatttcaaatgccttatgtaacataatttatttttctctttcctatagacttcaaaaattccagatatactgttgcatcctaagtggtatactgatacctaacctggcaacccacatgattgtctaaatattagggatttaaaataaagcctctgtaaattgtgtggtaaaaaattatctcattaattttctagtatgtcttcatcaccttcaatgatctttaaattaccatacagaaagaatttccccagtggggaaaatttaggaatctgatccaaaatgtaatrtgagagactgccaactgacaccaatgaacctttgagctaataaaggaaaaatattaaaacttaaaaatgagcaaaaatggtaagtgcagttctttttttcctactaccgaattgcccatttagcatgcacaaaaaaaaaaaaaaaaaaagagagagagagagagacctgtaaagaaaatatacaattaaacatctct

SEQ ID NO: 94454 - DNA, 599 bp, Chicken  19866894472912_1
  misc_feature (1)..(128): n is any nucleotide
nnnnnnnnnnnnnnnnnnnnnnnnnnnnnnnnnnnnnnnnnnnnnnnnnnnnnnnnnnnnnnnnnnnnnnnnnnnnnnnnnnnnnnnnnnnnnnnnnnnnnnnnnnnnnnnnnnnnnnnnnnnnnnnntgcccagggccccatccacccagccttgaacgtctccagggatggatggggcatccacagcctctctgggcagcctgttccagcacctcaccactctcatagtaaagaacttccccctgacatccagcctaaaccttcccctccttcaacttaaaaccatttccccttgtcrtgcagttatctacccttccaaagagttgactcccttcccgtttatagcctccctttagatactggaaggctgcaatgaggtcaccatgtaaccttctcttctccaggcacaaatgactcacagaatgcttttctacacattaaggctttcatccaattggccgaatagatcccagtgacatcaaaagcaaagcagcggggtttgggtcctagtcccttacacactcccttggatacaaaatgctctcatatctcataggcattgcttgaaggaatgttacacttcatggatatgtctaa

SEQ ID NO: 94455 - DNA, 599 bp, Chicken  19866894472913_1
  misc_feature (1)..(72): n is any nucleotide
nnnnnnnnnnnnnnnnnnnnnnnnnnnnnnnnnnnnnnnnnnnnnnnnnnnnnnnnnnnnnnnnnnnnnnnnctttttgtatgaatgtctgattgaaagggaatgtggggaagaagggatgttcgaaagatagaaatggggaaaactctcacctttaaatatagctgggtctgttggggcctttttggcaagttccatgaattgcagtgaagacgtgaaaggtggatgctcacttctgggtgccctttatatcaacttccatttacagcaaaacagccattaactcttctgcagtgcccygagctgtgcagaagtgggttctgagcagcatttctgtgccaagcactggtgcacatcctgcctgcaggacccactggagctgtggtgcttctgctccaaggcagggagctgctggccatgcgctctgctaacaaattactactggagctttaatataaaggggccttctgatggataagtatgccttgtatcgtgttctgagtgcaagtttgagttccagcgctgcacatawgagagctcttcacagcgtcaggccagcatcccatcacaggtggttgaacagaagtgattctgtagca

SEQ ID NO: 94456 - DNA, 600 bp, Chicken  19866894472913_2
cttctgggtgccctttatatcaacttccatttacagcaaaacagccattaactcttctgcagtgcccygagctgtgcagaagtgggttctgagcagcatttctgtgccaagcactggtgcacatcctgcctgcaggacccactggagctgtggtgcttctgctccaaggcagggagctgctggccatgcgctctgctaacaaattactactggagctttaatataaaggggccttctgatggataagtatgccttgtatcgtgttctgagtgcaagtttgagttccagcgctgcacatawgagagctcttcacagcgtcaggccagcatcccatcacaggtggttgaacagaagtgattctgtagcactttgtttttgaatcagaacaaatctgctcagtccttgaggtctcagggcagggctggttgggaagggctcagtggtggaattggaaagcctgggaagaagtgtcccacatccttcttctcactgagcatgttcaccatagagatatctcacccttacctggtgcacattcaccattttcaagctccttttcaagctccagtctgaagaagctttgaatttaacatggaatgt

SEQ ID NO: 94457 - DNA, 599 bp, Chicken  19866894472914_1
  misc_feature (1)..(92): n is any nucleotide
nnnnnnnnnnnnnnnnnnnnnnnnnnnnnnnnnnnnnnnnnnnnnnnnnnnnnnnnnnnnnnnnnnnnnnnnnnnnnnnnnnnnnnnnnnnnctcctatcattcataaaatgctacacggccccttctcttcaatttgagttgctgctttctattgcttctgttcaccaggagaaaaccaccaccatgtatatctcattttggtttcacaatgaaaacaggaatagaaattggagtgtgagtaagcagtaaaactgacgaggcagaggcaagtactttgctgctctgtgctcacactacyctccagcactactttggctgtatgcttatgctccaaaccgccacctcaaagtgtgcaaatascactgttgttttcaactccctttctgactctttctgccatcttttcacccatgcttaggccaccctgcagctgcagtgccatgcaggaaggtggctaacaggaagctgccagcacttaccccggctgacccggctgcgagtgcgaacccccagcgtcgtggtgctctctccactgacagaggaggtcttcagcacagccttcatgttctcgtgctctgcggcatcctcggcgtactg

SEQ ID NO: 94458 - DNA, 599 bp, Chicken  19866894472914_2
  misc_feature (1)..(30): n is any nucleotide
nnnnnnnnnnnnnnnnnnnnnnnnnnnnnnctcctatcattcataaaatgctacacggccccttctcttcaatttgagttgctgctttctattgcttctgttcaccaggagaaaaccaccaccatgtatatctcattttggtttcacaatgaaaacaggaatagaaattggagtgtgagtaagcagtaaaactgacgaggcagaggcaagtactttgctgctctgtgctcacactacyctccagcactactttggctgtatgcttatgctccaaaccgccacctcaaagtgtgcaaatascactgttgttttcaactccctttctgactctttctgccatcttttcacccatgcttaggccaccctgcagctgcagtgccatgcaggaaggtggctaacaggaagctgccagcacttaccccggctgacccggctgcgagtgcgaacccccagcgtcgtggtgctctctccactgacagaggaggtcttcagcacagccttcatgttctcgtgctctgcggcatcctcggcgtactgtaggccctggggctggactggggaggagggtgaggtgctggagaactttccggactgtggaa

SEQ ID NO: 94459 - DNA, 600 bp, Chicken  19866894472918_1
ccctgatacagctgcatgctgttctcccaggtcctgttgctgtcatccagtgagcagagatcaatgcccgtccctccactccacatgtgaggaagctgtaggatgccataaggcctcctttcagtcttttctttaagctaaacaaaccaaggagcctcagctattcatggcatgtggattttttgtttgtttgtttgttttttattcatttgttttgtttaaatatgtagtcatttatgatgcttgggttgattttatacactttagagtctccagcagaatctgaggcaggatatctcwgagaaacaggatgtgatttaccttcaggaaaagtgaaaggtccatcccttgctgatgttgcttcataagcagaaggaaaaaacagttcagcctaatactcactgtttccctatttgtagaataaaattgttgattatagcccttggctataatgttgttatctgcaatcaaatgcagctgtaacaacccataaccacccataatcatagaataaaagaataatttgagttggaatgaactcctaaaggtaatttagttcaactcccttgcaatgaacatkgacatctataggtagaccat

SEQ ID NO: 94460 - DNA, 600 bp, Chicken  19866894472918_2
atctgaggcaggatatctcwgagaaacaggatgtgatttaccttcaggaaaagtgaaaggtccatcccttgctgatgttgcttcataagcagaaggaaaaaacagttcagcctaatactcactgtttccctatttgtagaataaaattgttgattatagcccttggctataatgttgttatctgcaatcaaatgcagctgtaacaacccataaccacccataatcatagaataaaagaataatttgagttggaatgaactcctaaaggtaatttagttcaactcccttgcaatgaacatkgacatctataggtagaccatagaatcatagaatcacaaggttgaamaggacctacaagatcatctagtacaactgtcctcccattacccttgctaccacaarccactaaaccatatcttgtagctcctcatccaggygtctcttgaatactgccagggacagcaactccaccacctccctgggcaggccattccagtgcctgaccactctctgagagaaaaagtttttccttatgtctaatcaaaacctcctctggtacaacttgtggccatttccctgggtcctgtttgttgccaggga

SEQ ID NO: 94461 - DNA, 600 bp, Chicken  19866894472918_3
ggaaaagtgaaaggtccatcccttgctgatgttgcttcataagcagaaggaaaaaacagttcagcctaatactcactgtttccctatttgtagaataaaattgttgattatagcccttggctataatgttgttatctgcaatcaaatgcagctgtaacaacccataaccacccataatcatagaataaaagaataatttgagttggaatgaactcctaaaggtaatttagttcaactcccttgcaatgaacatkgacatctataggtagaccatagaatcatagaatcacaaggttgaamaggacctacaagatcatctagtacaactgtcctcccattacccttgctaccacaarccactaaaccatatcttgtagctcctcatccaggygtctcttgaatactgccagggacagcaactccaccacctccctgggcaggccattccagtgcctgaccactctctgagagaaaaagtttttccttatgtctaatcaaaacctcctctggtacaacttgtggccatttccctgggtcctgtttgttgccagggagaagaggccaaacccctcctcatcacaacctcccttcgggaagttg

SEQ ID NO: 94462 - DNA, 600 bp, Chicken  19866894472918_4
cagttcagcctaatactcactgtttccctatttgtagaataaaattgttgattatagcccttggctataatgttgttatctgcaatcaaatgcagctgtaacaacccataaccacccataatcatagaataaaagaataatttgagttggaatgaactcctaaaggtaatttagttcaactcccttgcaatgaacatkgacatctataggtagaccatagaatcatagaatcacaaggttgaamaggacctacaagatcatctagtacaactgtcctcccattacccttgctaccacaarccactaaaccatatcttgtagctcctcatccaggygtctcttgaatactgccagggacagcaactccaccacctccctgggcaggccattccagtgcctgaccactctctgagagaaaaagtttttccttatgtctaatcaaaacctcctctggtacaacttgtggccatttccctgggtcctgtttgttgccagggagaagaggccaaacccctcctcatcacaacctcccttcgggaagttgtagagtgcagtgaggtctcctctgagcctcctcttctccagactgaacagtcccag

SEQ ID NO: 94463 - DNA, 600 bp, Chicken  19866894472918_5
agaataaaattgttgattatagcccttggctataatgttgttatctgcaatcaaatgcagctgtaacaacccataaccacccataatcatagaataaaagaataatttgagttggaatgaactcctaaaggtaatttagttcaactcccttgcaatgaacatkgacatctataggtagaccatagaatcatagaatcacaaggttgaamaggacctacaagatcatctagtacaactgtcctcccattacccttgctaccacaarccactaaaccatatcttgtagctcctcatccaggygtctcttgaatactgccagggacagcaactccaccacctccctgggcaggccattccagtgcctgaccactctctgagagaaaaagtttttccttatgtctaatcaaaacctcctctggtacaacttgtggccatttccctgggtcctgtttgttgccagggagaagaggccaaacccctcctcatcacaacctcccttcgggaagttgtagagtgcagtgaggtctcctctgagcctcctcttctccagactgaacagtcccagctcgctcagcctgggactcctcataaggcctgtgc

SEQ ID NO: 94464 - DNA, 600 bp, Chicken  19866894472918_6
tccagtgcctgaccactctctgagagaaaaagtttttccttatgtctaatcaaaacctcctctggtacaacttgtggccatttccctgggtcctgtttgttgccagggagaagaggccaaacccctcctcatcacaacctcccttcgggaagttgtagagtgcagtgaggtctcctctgagcctcctcttctccagactgaacagtcccagctcgctcagcctgggactcctcataaggcctgtgctccagacccctcaccagctttgtttcccttctctggacacgttccagggcctcwatgtctttcttacagtgaggggccccaaactgaacacaatactcaaggtgtggcctcaccagtgctgagtacagggggatgattacctccctgctcctgctggccacactattcctaatgcaggccaggataccattggccctcttggccacactgtctgctgatgttcagccgagcatcaaccaacacccccaggtccctttcctcttcagagtcatccagccactcagccccatgcctatagcgctgcatggggttattgtggccacagtgcaggacccggcacttagccttgttgaa

SEQ ID NO: 94465 - DNA, 600 bp, Chicken  19866894472923_1
taatggaagagatgaggagcattatcctcagaagctgttgacattctcagaagagaaagtggagaaccccgtttctccttctctaagtagctctccgtttttttcctgacttagtcttgttgccagcagttggggcatggggcctgggaaggctcccgtcaaaccaagtacgtattatttttctgtaggctctttgtgagatcctaaaatacagctcttgcgatggagaaaggaggaaataatgaccgaatattgtgctgtcgttttatttctgaatcctgagcttgtggcgagggaacygaccgtgctgcggaggttgcacaagtgcggtctccagggtgtcactggcggtgtcaaggaaaacttcctcttttaatcagtcctgtggtgcagctgtgcttctgtggatgagtgggcatggctgggaggcatccagttaggcaaggaaaggccaggagggtgtgagccttgtctcgcttcatcttacttcatcttctcgtgaaatggggaaagggcagcagtgctgcagaggagggatcactttccttgacagaaactgaaatatatatgactgtaagcctgccttatacactctgcatg

SEQ ID NO: 94466 - DNA, 599 bp, Chicken  19866894472929_1
  misc_feature (1)..(2): n is any nucleotide
nnctgtttttggtatgattaccacatggtctacttagagtgaaaagaaaaaaaattacatctatttcctatgattggattgaaaaaaaatataaactgagacttagttaaaatatgattaagtattggaagttcattctaactaaataatccaggctagtttgctcatgagagcactcttggtttaccaggcagggaaagatcacttctgcactgtagctaacaaacccagacgtgctgcacagccaccagcaacatttgcatctctgttttaggatcaaagccacattaagaactgcastactcgaccacatctccaaccaaaattaattgcagactagcaatacttcaatgagtgttttgctgaaataaagaatagctctgctagctcctgcttggcgtgaggcgagtaatttgataattcatatggattgaaccaagcaaggcattcttccagatcctactgaactgaaacaaaaccacaacaagccctccagcatctggcattacaacagacagaacaatcaaatacactaaatacactaacgttactagcattttcttcaagatttttaggatgtttttacagtggcatccaca

SEQ ID NO: 94467 - DNA, 600 bp, Chicken  19866894472951_1
tcattcaagtcttagaaaaaagctacaaccactgcaatacctacttagatttttcagtaatcatgtctgcggggattaggttaaatagcaatcaagtaaccttctaatgaggttgagaaaagataataaaacatgctcggtatgctttccatacagagggcaacactcctgagcaggacaagcagctattactgccagagtacaaataacgtactttaattagtgtgtatacagcagctcttattgctcactacacctagacaaaggctttttttgtgcactaaaataaaagcacatttyaaatgttttaaaagccttgtctgaatatgagaaatacatttacaacagaaggctcatatcactcctttgcaggttccacttaaagtatactgcacaacacaatggggatccctgcgtataccacagagctgtaaaatgcattcctagcagaaacgtggcttatggataaatccaaagtgtactttgtagatatggctcatactaatataccctgttttctaatggtttaatgctcatgtttataaaataaatggctatcagtggcaccaacgcccctttacttcatttctttgtttttta

SEQ ID NO: 94468 - DNA, 502 bp, Chicken  19866894472953_1
ttatggccttctaacaaattccttttaaaacatgtggctacaaagctctgctttgagaatactagttccatgcctagcaagagccttttcatattccagtctccctcttgcgctcttcagttatttgcaaaccttctctgctttttgttaactacaaaccgcatctcctctgccatgcacttgcagtctgcttctgttcctcttaactctgccccagggatgacaatttggagcttcagccccaccttttaatatagattgctccctcagaaaaatgcatacagctcttggatgctaaayrtgcttccccaggttgtgagtatgttacctaatggggcttggtcagataggacactccttgcagtttattttcattaagagagactggtagaaggaaatggtattgactcataacctagaaaaagcttttgtatgaaattttggagagttgatccagctgctgtgcttaggtctgggatcattaaacagaacagtcttccct

SEQ ID NO: 94469 - DNA, 501 bp, Chicken  19866894472953_2
tatggccttctaacaaattccttttaaaacatgtggctacaaagctctgctttgagaatactagttccatgcctagcaagagccttttcatattccagtctccctcttgcgctcttcagttatttgcaaaccttctctgctttttgttaactacaaaccgcatctcctctgccatgcacttgcagtctgcttctgttcctcttaactctgccccagggatgacaatttggagcttcagccccaccttttaatatagattgctccctcagaaaaatgcatacagctcttggatgctaaayrtgcttccccaggttgtgagtatgttacctaatggggcttggtcagataggacactccttgcagtttattttcattaagagagactggtagaaggaaatggtattgactcataacctagaaaaagcttttgtatgaaattttggagagttgatccagctgctgtgcttaggtctgggatcattaaacagaacagtcttccct

SEQ ID NO: 94470 - DNA, 600 bp, Chicken  19866894472956_1
ctagaaatgctctgtgatagcaatagaagaaaatggataggctgcaaaagaaaggtacagccaaatagattctggatagagtagatgatgagttgatgatgccagttaaaatatcatgtaccaatgactcagcttctacttgggccacttcctagctatccagaatgttatctgttcaaaaaacatgagctatcatatacgtatcaataaaaccacagaatgaatctaattgttagaacagaggactggaaaatccaggcttctgcttctgccttggctacagatctgttgtaaaccaarccctaagtaaatcaaactcttcatgttcctgcatctgaatctgtaaagcagaggcagaaataaatatctagctgttctgtaaaacaaaagttttgcctttaagaagttaaaggaaacgcaaatatctccaagttagtcctaaatgactagttctttctgctgtaggtactggtaacatcctcctcctaagaactgccaaaaataatttaaatttcactctcttctagagtgttttttttccctttgggaaggagtggaaaggcaccagtcacataaaggcattcactgtagaactgcaaa

SEQ ID NO: 94471 - DNA, 599 bp, Chicken  19866894472965_1
  misc_feature (1)..(155): n is any nucleotide
nnnnnnnnnnnnnnnnnnnnnnnnnnnnnnnnnnnnnnnnnnnnnnnnnnnnnnnnnnnnnnnnnnnnnnnnnnnnnnnnnnnnnnnnnnnnnnnnnnnnnnnnnnnnnnnnnnnnnnnnnnnnnnnnnnnnnnnnnnnnnnnnnnnnnnnnnnnctgatgctcacagcatagcctgctttctggaaggaagcatcatctaagtccttttgttaaaccttaagcagaatggcacagaactccaagagtgcagcccacagaaaaatgatgaattcccatctaggagaatgttagagaatakaaatttatttatttatttacactgttctctatctggatgttttgttatgtattatttatttcaagcttcttacctggtaatgcgagtcctccaagagctacatatgaagcaatatcccacgagaattcacggggtggtaatgctattgcagaaactagattaatcccacacagaattccttaattaaattctgagaaaatatttttatatcccagtactgtagtaatgtccctcaactgcgtcaagggcttgatgccacttctctaagttctatgcatttgtcctatccctagcacttc

SEQ ID NO: 94472 - DNA, 456 bp, Chicken  19866894472965_2
ctacatatgaagcaatatcccacgagaattcacggggtggtaatgctattgcagaaactagattaatcccacacagaattccttaattaaattctgagaaaatatttttatatcccagtactgtagtaatgtccctcaactgcgtcaagggcttgatgccacttctctaagttctatgcatttgtcctatccctagcacttctgggcctagaaattcaccttcacttgtatctgtaacatgctttctttcattttcattaacaattacatttgcaagagaagaaatgaagaacaaatacrgatttgaaaagctgcaggagttaagaaaaagaaaaatgcatgaaatcttgcaataccttggccaaaaaatcagtctgcttttctcctgactaaactgaatagatagacatttgtacctgtatgcattagatattaaagaaacagttatgaaaagca

SEQ ID NO: 94473 - DNA, 600 bp, Chicken  19866894472966_1
ctgcagtgaggcagggcaacttccaagcagcaaaaatatagagataagagtgcctaaaatgccccaaatctgcacttaaaagccaaagtcatacatgagtgcaccaacatcatcaatgtagaagtgtccctcagtgccaaagtcataaatgggtgcaccaacgtgctcaatggggaaatgccctttctaggattctctgggagggttcaccagcacttcccagctcctctgctccgttccaggctggtgcgtgagtttataaggcagtttgacctgaagctcaacccgttccgccagacrgatgacaaygcctggtacttcgtgaacggcatccgagcgagagtggcagaagtgaacagaaaccccgacatcctgaattacaccctcaggccgtcagagaggggcaaaagtgccagccagctctacagggaagccctgcagtcggtatgtggtcatcaagccaacgcagttggtatgggctcatgaagccaacccagcaggacgagctcagcccattaccaaaccccacagcggtaccccagatgaatcccaacaaagcagaatttctttgcgaaatgcccttttttcccctccttgact

SEQ ID NO: 94474 - DNA, 600 bp, Chicken  19866894472966_2
ggcagggcaacttccaagcagcaaaaatatagagataagagtgcctaaaatgccccaaatctgcacttaaaagccaaagtcatacatgagtgcaccaacatcatcaatgtagaagtgtccctcagtgccaaagtcataaatgggtgcaccaacgtgctcaatggggaaatgccctttctaggattctctgggagggttcaccagcacttcccagctcctctgctccgttccaggctggtgcgtgagtttataaggcagtttgacctgaagctcaacccgttccgccagacrgatgacaaygcctggtacttcgtgaacggcatccgagcgagagtggcagaagtgaacagaaaccccgacatcctgaattacaccctcaggccgtcagagaggggcaaaagtgccagccagctctacagggaagccctgcagtcggtatgtggtcatcaagccaacgcagttggtatgggctcatgaagccaacccagcaggacgagctcagcccattaccaaaccccacagcggtaccccagatgaatcccaacaaagcagaatttctttgcgaaatgcccttttttcccctccttgactccatcaata

SEQ ID NO: 94475 - DNA, 600 bp, Chicken  19866894472994_1
aatttttccagctgccaccaatgatagtttgggggatttttgcaaacatagttcctcatggagaaaaatggggtccaaaagccataaactatttttcatcactggtgggattagaggtcacaggtcacgtggaagctgttacatcatgccagttgtttattcttgaagtaccgaagatcatcagcgatgttcttgaactgaacttagggaaacttatggatagagattccttttgtcttattgtagaaatgttaaaagcattttccccgcagttcaggacagtgccacaatttctgcagsagaaacgttcagtccaggagttgtgtagttttagtagtaatcctgagaaaccatcagactcctggttattttcagatgttctctttccaaatctaccaactgacagtagggtaagtgtaaaaataactgctgcagaaagcccaagtaaattttactgtcagatacaaaaatggcaaaaagagctggaaaatttgacagaagctatgtgtttgtattatgaagataccagcacaaaaattaatacattttctgatagtttagggcaattttgtgctgctaaaaggaaaaatggacagtggc

SEQ ID NO: 94476 - DNA, 600 bp, Chicken  19866894472994_2
agtaaattttactgtcagatacaaaaatggcaaaaagagctggaaaatttgacagaagctatgtgtttgtattatgaagataccagcacaaaaattaatacattttctgatagtttagggcaattttgtgctgctaaaaggaaaaatggacagtggcatagaggagtgataagacagcttctaccagacttgtctgtggaagtctggtttatggattttggtaacatcgaagctgtgccatctagttgtgttcagaagcttctagcagagttcatgtcactaccaatgatttcattcccrtgtgcattgtcttattttgctaatcgtgataaggcagtaacaaaacttcagctgaagagatttatacaggccttggcgggacaamattcagtatgtatttatgttaattcatttgatgccagtgatcacttgtattatattacattgccagatgaaaattttgaaattgatactaaaaatccagaaaagttgaatgaaggagctgccttatgtgtctcacctttagaaaacaaaatcaccagtattggtgtaagctgcaaagcacatgctgtgtgctttacacgcagttctcacaattca

SEQ ID NO: 94477 - DNA, 600 bp, Chicken  19866894472994_3
gcacaaaaattaatacattttctgatagtttagggcaattttgtgctgctaaaaggaaaaatggacagtggcatagaggagtgataagacagcttctaccagacttgtctgtggaagtctggtttatggattttggtaacatcgaagctgtgccatctagttgtgttcagaagcttctagcagagttcatgtcactaccaatgatttcattcccrtgtgcattgtcttattttgctaatcgtgataaggcagtaacaaaacttcagctgaagagatttatacaggccttggcgggacaamattcagtatgtatttatgttaattcatttgatgccagtgatcacttgtattatattacattgccagatgaaaattttgaaattgatactaaaaatccagaaaagttgaatgaaggagctgccttatgtgtctcacctttagaaaacaaaatcaccagtattggtgtaagctgcaaagcacatgctgtgtgctttacacgcagttctcacaattcatgtgagaatttgtctgaaaatagacagacaaaaaactgcttacctgaacggggtgagtctttatcaagtcattgcaaacgygtag

SEQ ID NO: 94478 - DNA, 600 bp, Chicken  19866894472994_4
caamattcagtatgtatttatgttaattcatttgatgccagtgatcacttgtattatattacattgccagatgaaaattttgaaattgatactaaaaatccagaaaagttgaatgaaggagctgccttatgtgtctcacctttagaaaacaaaatcaccagtattggtgtaagctgcaaagcacatgctgtgtgctttacacgcagttctcacaattcatgtgagaatttgtctgaaaatagacagacaaaaaactgcttacctgaacggggtgagtctttatcaagtcattgcaaacgygtagaaatgcagatgaattctcatcatgctgcttttgtggtgtacgtcataaacccgtccaacttctggattcaaacgtgtgcctatcagaatgagtttcaagccttgacggaaaatattgcagatgtgtataaccagtgtggagctgaggaaagagtccttaaaaacccggaacctggattactgtgctgtgcccggtatagcaaagatggacattattatcgaggtattgtcactgaagtgcttgatgtaaatgttactgtttattttttggattttgggaatacagacgtagtaccc

SEQ ID NO: 94479 - DNA, 600 bp, Chicken  19866894472996_1
gcaaagtgggtacagcccagactttcctcatatgcttccaaaggatgtgtgatgcttggttggttggttggttggttggttggttggttggttggcaaaatgcatgattgccttaaggggtttggggcttccttgtactttaaggaaaaaacaaaatgggaacgatggatggagagaacatcaggaaggagactgcgctcagccccgagtggtttcctctcaagacagccatgcgagtctgtctggctctgctgacagcttgggactgcagaacggctctgattcttccccaggtgcatyttctgtggtcacagcgagaggcaccgacggctgcattgcaggtgrgcgcccgcccttcccgggggcagccctggcacagggagagcaaagcaaagcccggcaccgtcctgccggcaccgggggctctgaagaacctcagccacgagcgatgcgcactgtgtaaagctgctccttagacttgttaatgttttattgtagtcggagtttatgatgacagcgaacctttcaaactgcagaggggtaactgcttccttgccgtattaaaaaataatgctggtgtagatgttatgtaccatagtt

SEQ ID NO: 94480 - DNA, 600 bp, Chicken  19866894472996_2
tgtgtgatgcttggttggttggttggttggttggttggttggttggttggcaaaatgcatgattgccttaaggggtttggggcttccttgtactttaaggaaaaaacaaaatgggaacgatggatggagagaacatcaggaaggagactgcgctcagccccgagtggtttcctctcaagacagccatgcgagtctgtctggctctgctgacagcttgggactgcagaacggctctgattcttccccaggtgcatyttctgtggtcacagcgagaggcaccgacggctgcattgcaggtgrgcgcccgcccttcccgggggcagccctggcacagggagagcaaagcaaagcccggcaccgtcctgccggcaccgggggctctgaagaacctcagccacgagcgatgcgcactgtgtaaagctgctccttagacttgttaatgttttattgtagtcggagtttatgatgacagcgaacctttcaaactgcagaggggtaactgcttccttgccgtattaaaaaataatgctggtgtagatgttatgtaccatagtttaggcggccgttaggagtgcttctttgacaacgttctgtttgagg

SEQ ID NO: 94481 - DNA, 600 bp, Chicken  19866894472997_1
aggatagggatagggacacgaggtggggaacatgggtgacgggaatagggatgtggggtgggggatgtgaggatggggacaggataggaaccacagagacaggagatgaggacaagaaaactagaggggacagagacactcaaggaagacagaaggggatgggagatgggaacaggaatggggagagtggatgggattgggacaggtgggggaccacagagacaagaaacagggacagaagaggggatgagggaactggaggggacagagccagacagagacaggacacagggacaggasgggatgggaggacagagaggatggggggacaggaggggacgaggtcactggagggatcaggagtgaagagaggggagagcacaggaggggacaaggtcactcacagaaacgaacgatgtcactgaaggggtcagggggacaggagtcaggaggggacaagggaaggacaggcatggccacaaggatacaggtctcctcatacacctgcagcgtggccatgtctccctccaggcggatgatctcccccaccagctctgcatgccccacacgcaccagttcatacatggctgcccctgccat

SEQ ID NO: 94482 - DNA, 599 bp, Chicken  19866894472998_1
  misc_feature (1)..(41): n is any nucleotide
nnnnnnnnnnnnnnnnnnnnnnnnnnnnnnnnnnnnnnnnncgagtgagagccgctgccccgtgtgcccttcccctccgtgccttccccagctggcggctgccaggaaacgagccctgtgtgacagctcagcccagagcagccctgcagcaacagaggggacccggggatatcagagcacagcgccagcacagatcaaccagagcagaaatcccaggcaggatgcaccagggtgaggccggagcagaaaccctgcgtgctcctgggaaggctgcagcacagcaatgcccggagctgcagygcacaycaacagcrtttgctgctggttctccccacgctcctgcgtacacgggcagctccaagagccgcctgcagcctcctccatttgccaccctctgccctgcacttccctggggctgyggacagccaaaacccgcacacatcagagaaacaccacggaggtgttcagcaaagagcacagtgttaagaaagcccagagggagacacgtgaagcccagaagatggttcggagcagtacctttgttgtcagtgctcatctgcccggcccgtgcgcggagctgcctgctgccctttagcttt

SEQ ID NO: 94483 - DNA, 599 bp, Chicken  19866894472998_2
  misc_feature (1)..(35): n is any nucleotide
nnnnnnnnnnnnnnnnnnnnnnnnnnnnnnnnnnncgagtgagagccgctgccccgtgtgcccttcccctccgtgccttccccagctggcggctgccaggaaacgagccctgtgtgacagctcagcccagagcagccctgcagcaacagaggggacccggggatatcagagcacagcgccagcacagatcaaccagagcagaaatcccaggcaggatgcaccagggtgaggccggagcagaaaccctgcgtgctcctgggaaggctgcagcacagcaatgcccggagctgcagygcacaycaacagcrtttgctgctggttctccccacgctcctgcgtacacgggcagctccaagagccgcctgcagcctcctccatttgccaccctctgccctgcacttccctggggctgyggacagccaaaacccgcacacatcagagaaacaccacggaggtgttcagcaaagagcacagtgttaagaaagcccagagggagacacgtgaagcccagaagatggttcggagcagtacctttgttgtcagtgctcatctgcccggcccgtgcgcggagctgcctgctgccctttagctttgtctct

SEQ ID NO: 94484 - DNA, 599 bp, Chicken  19866894472998_3
  misc_feature (1)..(27): n is any nucleotide
nnnnnnnnnnnnnnnnnnnnnnnnnnncgagtgagagccgctgccccgtgtgcccttcccctccgtgccttccccagctggcggctgccaggaaacgagccctgtgtgacagctcagcccagagcagccctgcagcaacagaggggacccggggatatcagagcacagcgccagcacagatcaaccagagcagaaatcccaggcaggatgcaccagggtgaggccggagcagaaaccctgcgtgctcctgggaaggctgcagcacagcaatgcccggagctgcagygcacaycaacagcrtttgctgctggttctccccacgctcctgcgtacacgggcagctccaagagccgcctgcagcctcctccatttgccaccctctgccctgcacttccctggggctgyggacagccaaaacccgcacacatcagagaaacaccacggaggtgttcagcaaagagcacagtgttaagaaagcccagagggagacacgtgaagcccagaagatggttcggagcagtacctttgttgtcagtgctcatctgcccggcccgtgcgcggagctgcctgctgccctttagctttgtctctctttcccc

SEQ ID NO: 94485 - DNA, 600 bp, Chicken  19866894472998_4
gtgacagctcagcccagagcagccctgcagcaacagaggggacccggggatatcagagcacagcgccagcacagatcaaccagagcagaaatcccaggcaggatgcaccagggtgaggccggagcagaaaccctgcgtgctcctgggaaggctgcagcacagcaatgcccggagctgcagygcacaycaacagcrtttgctgctggttctccccacgctcctgcgtacacgggcagctccaagagccgcctgcagcctcctccatttgccaccctctgccctgcacttccctggggctgyggacagccaaaacccgcacacatcagagaaacaccacggaggtgttcagcaaagagcacagtgttaagaaagcccagagggagacacgtgaagcccagaagatggttcggagcagtacctttgttgtcagtgctcatctgcccggcccgtgcgcggagctgcctgctgccctttagctttgtctctctttccccccartgcattgtgacagtccccagggcagagcagctctttagtgtggtctgcaccgtgtgtggtgaggagccctgctctctagcttttttctcggtgcagtttcca

SEQ ID NO: 94486 - DNA, 600 bp, Chicken  19866894472998_5
gctgctggttctccccacgctcctgcgtacacgggcagctccaagagccgcctgcagcctcctccatttgccaccctctgccctgcacttccctggggctgyggacagccaaaacccgcacacatcagagaaacaccacggaggtgttcagcaaagagcacagtgttaagaaagcccagagggagacacgtgaagcccagaagatggttcggagcagtacctttgttgtcagtgctcatctgcccggcccgtgcgcggagctgcctgctgccctttagctttgtctctctttccccccartgcattgtgacagtccccagggcagagcagctctttagtgtggtctgcaccgtgtgtggtgaggagccctgctctctagcttttttctcggtgcagtttccatgctcggtttcagaatgacgacctctgatgtcgcactgccgcgggcagcggctctctctcgtgcacaagtgggtttatctcgcatcctttcatttaactctcacacccagctggggggctgacggctttcaaaataaaaccaagctgccaggaggctcctggggctctaccagcctttttgcaaatgctttgctgaaa

SEQ ID NO: 94487 - DNA, 600 bp, Chicken  19866894473002_1
ataggctaagtgagaaactttgcaaagagctctcagcacaaagggaacggagatggcaagcccagcacatctccatctgcacttgtttttaagtgacaaaggaagaaacttaattagaacaggaaataatacacactaccatcattacagagttatcattttcctttaaaaaaggaatcagcttagagaaaacaatcaataaaagccagaacaacctagccttaaccaagctgtgagtgaatgcttgtggtgcccaactatttctgtcaccatcagatgtcacccagccctccttcactrcactgtgctgattttgtgattgtcttctttgttttttttctgtactttctcttcccactccaaacctctcctgtcaaaaagctgtcaggagttagttaaaaggggaacggtatttttcatgtagcttctgggctggttacttgacactgtaaaagaaacaacatgaaccaaagtgttcagctatagccactctggacacaagtgggaatataccttttaatgagcacttgkaggatgacaatggcaactaatttaatgttataatgcctataggtacaaacactgtgatagcactgtgtt

SEQ ID NO: 94488 - DNA, 600 bp, Chicken  19866894473002_2
tgtgagtgaatgcttgtggtgcccaactatttctgtcaccatcagatgtcacccagccctccttcactrcactgtgctgattttgtgattgtcttctttgttttttttctgtactttctcttcccactccaaacctctcctgtcaaaaagctgtcaggagttagttaaaaggggaacggtatttttcatgtagcttctgggctggttacttgacactgtaaaagaaacaacatgaaccaaagtgttcagctatagccactctggacacaagtgggaatataccttttaatgagcacttgkaggatgacaatggcaactaatttaatgttataatgcctataggtacaaacactgtgatagcactgtgttagcactttcttgtgtatgtgaagggcaataaggtggagttcatattttcttactygaattgattgaatacacattgtttgtttcataatattgactgctctctcactacttctctgctgggactgcttttaacattccaaattaataagctacttcagcgcccctttataaaataaacctctataaaataaattaatctatctcaggaaggtttttcctcagttctgcatc

SEQ ID NO: 94489 - DNA, 600 bp, Chicken  19866894473002_3
cactccaaacctctcctgtcaaaaagctgtcaggagttagttaaaaggggaacggtatttttcatgtagcttctgggctggttacttgacactgtaaaagaaacaacatgaaccaaagtgttcagctatagccactctggacacaagtgggaatataccttttaatgagcacttgkaggatgacaatggcaactaatttaatgttataatgcctataggtacaaacactgtgatagcactgtgttagcactttcttgtgtatgtgaagggcaataaggtggagttcatattttcttactygaattgattgaatacacattgtttgtttcataatattgactgctctctcactacttctctgctgggactgcttttaacattccaaattaataagctacttcagcgcccctttataaaataaacctctataaaataaattaatctatctcaggaaggtttttcctcagttctgcatcttgcctctgaaattacagctcaggctgtaaacaggcaatagtcactcctgcacctgtggcagcatccctccaggacagaacatgagaatttaacattggttgaacaggaactctcttcttccca

SEQ ID NO: 94490 - DNA, 599 bp, Chicken  19866894473005_1
  misc_feature (1)..(108): n is any nucleotide
nnnnnnnnnnnnnnnnnnnnnnnnnnnnnnnnnnnnnnnnnnnnnnnnnnnnnnnnnnnnnnnnnnnnnnnnnnnnnnnnnnnnnnnnnnnnnnnnnnnnnnnnnnnngcaggatgacttccctagtcctgctcaccacaccgttcctgatccaagccaggatgccattggccttcttggccacctgggcacactgctggctcatattcagctgattgtccatcaggtacaccaaggtccctttccagcaggcagctttccttccagccactcctccccaagcctgtagggttgcctggrgttgttgtgaccaaaatgcaggacctgacacttggccctattgaaactcatacagttaaccttggcccatcgatccggtctattgaggttcctctgtagtgcccttctcccttcaggcagatcaacattctctccaacttggtgtcgtctgcaaacttactgagggtcccctcatcaagatccctaataaagatattaaatagaagcagccccagtactgagccctgggggacactgctcatgactagctgccaattkgatttaaatccattgaccacaactctttgggcccagccatc

SEQ ID NO: 94491 - DNA, 562 bp, Chicken  19866894473005_2
tccttccagccactcctccccaagcctgtagggttgcctggrgttgttgtgaccaaaatgcaggacctgacacttggccctattgaaactcatacagttaaccttggcccatcgatccggtctattgaggttcctctgtagtgcccttctcccttcaggcagatcaacattctctccaacttggtgtcgtctgcaaacttactgagggtcccctcatcaagatccctaataaagatattaaatagaagcagccccagtactgagccctgggggacactgctcatgactagctgccaattkgatttaaatccattgaccacaactctttgggcccagccatccagccagtgtttcacccagcagagcatatgcccatccaaaccgtgtacagccagcttctcaagagtctataatctttagagaacttcaatggcaaaaacacaaaatcaaaaccacaggcatccttcaggacttgagctcagctactacattttgtctagatttggtctcacagcactactcattcagcaacaaagatgatcttgactgcactggccttgcg

SEQ ID NO: 94492 - DNA, 599 bp, Chicken  19866894473009_1
  misc_feature (1)..(16): n is any nucleotide
nnnnnnnnnnnnnnnntcctccccttcgggacctgccggcgaccgccggccgccatcggtctccccttcagccggcagcgcgtcctctgcaaccccggggcgctggggagcctcttcgtctccgactggggcttcttcctcctccttctcaagttctgcccccgacggggcttcctctgtcactccttcgtcctcggggcttggtgccgacgaggcttcttcctgcaccgcgtcctcggggtctgtccctacccgggcttcttcccgcatctcctcttcgggttccatccccgacggtgmgtcctctctcactccttcctcgggcctcagccccgacggggcttcctctctcacagcctcctcgggttccgtccccagcggggcttcctctctcatagcctcctcgggctcagggcccgacggggctgcctctctcatagcctcctcggggtccgtctcggatgcggtttcatctctcactacctcctcggggcttgatctcaacgggccttcttctctcactgcctcctcggggaccgtcccggaggggccttcgttccgcaccgcctcttcgggttctgctcccaccgcgttcacct

SEQ ID NO: 94493 - DNA, 600 bp, Chicken  19866894473018_1
tgcagtcagatccctaaagaagctttttgctccatttagcagagcctcattctcagggcacaccacaacataagcaacatctctttgagatccataaggttccagcatcagcctctcccagtacggcaatgcaaacggagacagcaccagaaaatcgtaatcgtatcccaacaaaaacgttgggattggcagtggttctggggactcatcagttcctggaaaagcaagatagatttttccaatatattaagcagcaagcttaaaaattaacaacctgcttctagaaaacacgaaaagaaraaacaccagcattcccagcatctaaaaggaagtagcactgattataaatggaatagttctccttttaacagacaaaaagcatgcattgcatgatccaaccctctgaaaataaacacaaaaaaagaaaaaaaacagctgattattctcatctgaaatctcccagggcctaaagaagttacacagttgcttattatgtttaccactatacaatcaggaacagatcttcactgtctaggaagccttcctcatagaatctaaggaatcagtgatcaaaaaagagaggggaagagatgtaaatag

SEQ ID NO: 94494 - DNA, 600 bp, Chicken  19866894473019_1
aatgccttgtgtaagtcctggttggagtgccagtgcatagagatcagagcaggaaagtgcaaaattcctcttgttttttcatctgtcttgattcagctcagtgccaatagccctgcataaccattcaaaatatggcctgaaaagcaactgactttgttgactgaccctcagagtattcccctaaaacgctccttagagaatgctgacatgatgtgcaccatctcagaccaaagccacagacaacaaaaaggcctccttctcctctcagtcacttaatgcagtatccagaaaacccgttckcatggcctttgagcctgagcctgatcctgctttgtatgccagctgcaatccactattgtaatggctcaagcagccccaaagcctgttaatcaggcactggcaagcagccttccttgctgattttacattaccccaggaaacgggacatttccaacacactctgaatgcactgcagccccgagctgtcagagcagcctctgcgggcacaaatcagaaggggggggctttctccgggaattgcagcagaaattgaacggcttcrgggcacttggcgtaaaatacagcctttatgccaccttc

SEQ ID NO: 94495 - DNA, 501 bp, Chicken  19866894473019_2
tctcagtcacttaatgcagtatccagaaaacccgttckcatggcctttgagcctgagcctgatcctgctttgtatgccagctgcaatccactattgtaatggctcaagcagccccaaagcctgttaatcaggcactggcaagcagccttccttgctgattttacattaccccaggaaacgggacatttccaacacactctgaatgcactgcagccccgagctgtcagagcagcctctgcgggcacaaatcagaaggggggggctttctccgggaattgcagcagaaattgaacggcttcrgggcacttggcgtaaaatacagcctttatgccaccttcatgcacagccacaaatgaagatctggctctttgcatgggaatgaagcatagaaaaaatgttttaaaggatacaagagcaaagaagcattttgtactggttagctcttttctctccgctgtgatctctgctcgctggcatcctggtgtcaacagatgcaaagta

SEQ ID NO: 94496 - DNA, 600 bp, Chicken  19866894473027_1
gtgggccgtcacccctctggtgggctggtgtgggttgtcccacagacctgccgtgctctcagctgccctgaactgggaacagtctttcaaaattatggctgaattattctctgccttgcccgaattctcttgttttcagagtcagatctggcctgacagccttcccgcggagcctacgaagaaaacagatctgccgctgttttttcaggctccctcacaatgcaggatcttgatgaaattaacagctggcaaatgcgaaacgtggaaaaggaaacagcgcttggggcggcgcgctgtcaytgtaacccttggaattcagggctgtgggaggctsttgtggctggatgctgtttcaaggacagcggcgcaacaaatggagcactcggaaacaaaagctcagagaggaaagcaaaggctggcaggggatgggggaggaatccccgtcccagcatggtaccgggtggctggctgtgtggtttgggaggctgctttttgctgaagtatttgggaatcatctgggaatgggaagcaatgcaaaaccataaatttatagctttgtgtttacatatcccaaagttggagagcttggctctctggaac

SEQ ID NO: 94497 - DNA, 600 bp, Chicken  19866894473027_2
ttgtcccacagacctgccgtgctctcagctgccctgaactgggaacagtctttcaaaattatggctgaattattctctgccttgcccgaattctcttgttttcagagtcagatctggcctgacagccttcccgcggagcctacgaagaaaacagatctgccgctgttttttcaggctccctcacaatgcaggatcttgatgaaattaacagctggcaaatgcgaaacgtggaaaaggaaacagcgcttggggcggcgcgctgtcaytgtaacccttggaattcagggctgtgggaggctsttgtggctggatgctgtttcaaggacagcggcgcaacaaatggagcactcggaaacaaaagctcagagaggaaagcaaaggctggcaggggatgggggaggaatccccgtcccagcatggtaccgggtggctggctgtgtggtttgggaggctgctttttgctgaagtatttgggaatcatctgggaatgggaagcaatgcaaaaccataaatttatagctttgtgtttacatatcccaaagttggagagcttggctctctggaaccaaaaagagaatatgggccaatttctaatccttt

SEQ ID NO: 94498 - DNA, 600 bp, Chicken  19866894473029_1
ttttatctcccagaatgtgaaatgaaaagtccccattcgcccaccacacgaaaaacacagctctgcaatcacagtgctgtgcagtactgcactacagaaaataacacaactgcccctgaaagcaccaaagtgagtcatctctgtatccaattgtacagatatatagtcacactccttgacactgtagagcctactgcaagcaatcctatctctggtaatgaccaagagtcacagaagtacccatttggatcaaccggctgtcaacctacagcaattctaccgaattctatttttattctkcattttcttccacacagtagagaagaacatggcatttgctaagtatattgtgatctgtatgtgatccatttgctgacctgtgctgaagcatccactggtgtctgtgtaagctccctgcccaccagtacccatgcatccatgccagctgagggcagggactggcatttgcacagcacactgcaagctggaagtgatatgaagcttgtcccgcttacagtgctcatctttggcagagcttgtgcatgcaaattgtgcaatgacttcccagaaatcaacaaaactgttcattttaacagcaga

SEQ ID NO: 94499 - DNA, 528 bp, Chicken  19866894473042_1
aactccattatgtatttactgtagtacctagtgaatagtgaatttgtgagaaaggtacctgaacaatttatcgatttagtttcaaaatcacatcatcaaaattgctttcagaactaaagataccattttcaaatatgttggtgtgtgttaaacttccaaagatgacagaaaggcacactgtttaaatggcatcttcataaggggtaaatattttaagttacacattcagtttcttctttgattcagattcttcttcaaatatcttctttgtagaggggaatgataatatgtggaataccrtatcatgagctatgtgatatggtttactggcttgtggtagcaacggtaatgggagaatggttggactagatgatcttgtaggtcctttccaaccttgtgattctatgattctatgattcttattattttgtgtcaacagagcagatagtattagagattaaatctttctgatatcaagaattcttaagaaaaaagatgtttcttggcataaagttagaatttccattt

SEQ ID NO: 94500 - DNA, 600 bp, Chicken  19866894473049_1
tgggagagtggcacataccactgcgtgaggtgtgagcaggtggatgatctgctcagcctggtggcatagctccaggagaaggtggagagattaaggagcatcagggagtggtgagcaggaggtagagtggtggagcaattctctgccttacctacaagaaaggcactggggtgatacaccctacgtagcggtggacctcctgccttgtcactgtcaggctaaggaagggacctaagagatggggaggaatggaagcaggtctcagcctggcattgcaggcaaacttcttccctacctatyttgcctttccaggtaataggtttgaggctctggaactcaagggacaggtaaatgaggaagcagtggaaggtccaccccggatattgtgtaggaaaaggcaatccactccatgcctcaagactgcctccacagagaaggaaagaatggtaactgctgtaggtgactcctttctgaggggaacggagggccccattgtgtaggtcataccctacctgtaggggagtgtgctgctttcctggggtctgggtcatagaccttaccagaaaacttcctgtctggtttgcccctctagttattatc

SEQ ID NO: 94501 - DNA, 600 bp, Chicken  19866894473056_1
aaatcttctgcatccttacactacccaccatgctcttacacatttataatatggctctaaccatcaaaacttgtcatcaacagccaacttttccaaatcagctagaatgattatttcaatactttctgcaatttgactttctaaggatacagtgtttcttgtagaaaaaaaatatatatacatatatatgtatatatattataaaaatgtatacagatacactgcatgcagctcatgtatttgaattactagaaacaaagccactttcataacaaaaataaagtaagtgcaaaatactaytgcactcattcctacttggttatattatggttatttaattcattttatgtcccccactttattcattttaactgtaaattgatagttacagcacatcttttcaaagcatacagaaataagaatatatgcattgtttcattcttcataatctattgttaattttgccaggttttacatttcttaaacacctagcaaggtcaagctaacaattatgatcatttaacagaaacaactatgtgacactgtcacagaaactgctgaaaataggaaagcaaaggaaataaaagaaataactatgga

SEQ ID NO: 94502 - DNA, 600 bp, Chicken  19866894473058_1
gccacctccacccatctgcccctggccctgttttctagatgacccctgccacgcctggctcgttcgcctgcctccataaggagaacaaggaaatactctcctcttcccaagcacctcatgaattcttgcttcattccctctgcccacatacgcaggctgtcagtgggccccagaaagctatgggcagccaggagcatcgaaggcatcctgaaactgggctcccccactgctgcaagggtggaggagatgccaagaggcaatcccattccttgcccccagccccaccctgggttctccacrggkgttgtctccctgtgccagcyatccagagggctgcctcttctcccacttctctcctgccctgccccttgcaaacactgcagggctgccacatgtcccttggtttgggtgttggctgcccagtggctgcccacaccactgcagtcccccagaccagagcttggtgctcaagttccacacctccctccttgactttccctccccttcccacattttgggaacagtgatgctgctgagctgcaaaagacctaactgtgggtgagggcacccaaattcccctctcacaagggacactgtggg

SEQ ID NO: 94503 - DNA, 600 bp, Chicken  19866894473058_2
acctccacccatctgcccctggccctgttttctagatgacccctgccacgcctggctcgttcgcctgcctccataaggagaacaaggaaatactctcctcttcccaagcacctcatgaattcttgcttcattccctctgcccacatacgcaggctgtcagtgggccccagaaagctatgggcagccaggagcatcgaaggcatcctgaaactgggctcccccactgctgcaagggtggaggagatgccaagaggcaatcccattccttgcccccagccccaccctgggttctccacrggkgttgtctccctgtgccagcyatccagagggctgcctcttctcccacttctctcctgccctgccccttgcaaacactgcagggctgccacatgtcccttggtttgggtgttggctgcccagtggctgcccacaccactgcagtcccccagaccagagcttggtgctcaagttccacacctccctccttgactttccctccccttcccacattttgggaacagtgatgctgctgagctgcaaaagacctaactgtgggtgagggcacccaaattcccctctcacaagggacactgtgggcag

SEQ ID NO: 94504 - DNA, 600 bp, Chicken  19866894473058_3
ggccctgttttctagatgacccctgccacgcctggctcgttcgcctgcctccataaggagaacaaggaaatactctcctcttcccaagcacctcatgaattcttgcttcattccctctgcccacatacgcaggctgtcagtgggccccagaaagctatgggcagccaggagcatcgaaggcatcctgaaactgggctcccccactgctgcaagggtggaggagatgccaagaggcaatcccattccttgcccccagccccaccctgggttctccacrggkgttgtctccctgtgccagcyatccagagggctgcctcttctcccacttctctcctgccctgccccttgcaaacactgcagggctgccacatgtcccttggtttgggtgttggctgcccagtggctgcccacaccactgcagtcccccagaccagagcttggtgctcaagttccacacctccctccttgactttccctccccttcccacattttgggaacagtgatgctgctgagctgcaaaagacctaactgtgggtgagggcacccaaattcccctctcacaagggacactgtgggcagtgctgtctgtctgctggagg

SEQ ID NO: 94505 - DNA, 599 bp, Chicken  19866894473059_1
  misc_feature (1)..(5): n is any nucleotide
nnnnnctgaaggttgcaacagatgaaattgagtaacaattaattcactgctgaaatcagaactgcacatttcaaacgcatcctgaacttgctcttctacaacagagataatgacaacagcgaaacattttgtaatatccaacacaatctggactgaatgctgagcactgagttaaaagccactctaaacctgcttgaccagtaagaacaaatggatgcagtgtgtccttatggctaacacacgtaagctctttctctgctttaaataacaattctcgtgggtttgatccttgaaccctaractttgcttacttcaagagatttaagtcaatttactttatattgctaaaataccaggcccttgaastatgggttcccataaggtctttcctaagttgaggtgctttcaacaaaagtgaaaaatacacatatttcagttgcttttctatcaatttgagcacttatctcatgagttttgcaaaagatttttctgcttataagacagagcatagggattcacaaaaattgcattaagaatgatacccaccaataacacgcaaggagtttgtctcagtaagcagaggcaggagtaccaaccaa

SEQ ID NO: 94506 - DNA, 600 bp, Chicken  19866894473059_2
catttcaaacgcatcctgaacttgctcttctacaacagagataatgacaacagcgaaacattttgtaatatccaacacaatctggactgaatgctgagcactgagttaaaagccactctaaacctgcttgaccagtaagaacaaatggatgcagtgtgtccttatggctaacacacgtaagctctttctctgctttaaataacaattctcgtgggtttgatccttgaaccctaractttgcttacttcaagagatttaagtcaatttactttatattgctaaaataccaggcccttgaastatgggttcccataaggtctttcctaagttgaggtgctttcaacaaaagtgaaaaatacacatatttcagttgcttttctatcaatttgagcacttatctcatgagttttgcaaaagatttttctgcttataagacagagcatagggattcacaaaaattgcattaagaatgatacccaccaataacacgcaaggagtttgtctcagtaagcagaggcaggagtaccaaccaacttaaattgctgtggttctttagtaactcactgataaaacattgcaccagcaataaatgcagggact

SEQ ID NO: 94507 - DNA, 600 bp, Chicken  19866894473062_1
ttttacttttaagaaggtgtgctcaatagacatggagataagagggtcaaatgtgtcttgataagagtcttatccaccacagatctcatcagtttagccatgaggcaatgagagatagtgtttcaaagatgtgtaagactgtgtatgtgctgcttttgtctttgcaacagactattttggttagcagaccattctttcatgttttgggtataacatctcagtaatgaggcttttggtctctccttttcacagaaattctaccagtaggaagagctagcaacaaaatttaataaaatataygcaggaagattccacctcttctgtcataccaccaccatcctcctctgatgtgggccaccaaagtaaaatagaaaacattactttgggagcagcggtcataggtagtttcagctggtataacctctctatgttttctgcattgaaagtaagtgtttattacttggaaacccagaaaagacctgtcctttaatcatttaaatgtgggatctgaaatgttataaaatgcacctgttagagactgtgctggaattcaattagctcttatgtgatttttgcagctgaactaattggctgaaagat

SEQ ID NO: 94508 - DNA, 600 bp, Chicken  19866894473063_1
gctgcccagggctccatccaacctggtcttgaacacctccagggacggggcatccacagcctctcctggaacatttggttacattttctcttggattctacttcaagcctggccagggctcaatgagggagcaaggaggtttgtatcctagtaggaccttacaccgtgcttctattgacacctatgtggccctgtgttcatggcctggcactggcctgtgcctgctgcctgtttgggtgtgggctcagagctctgacagaggtgagcagggatcatgggtatgctagcagaaatcccctyagaaaaccaattttattttgtccagtgttaatggggcactttgatttatgtaaacctcttatgttctgtattcttcttctcttgcaaaaaractgtggtgtgctcaaagtactggcttccacagaggttgttgggagcacagcttttaggtgagcacgagtgtatgtgcaggtggaagcttccaaaggctgcgtggccttggggctgctggtttgggggggcacagaggggcggcgaggggctctgccaggttgggctggctccagatatcgtgtggcacgcacagcgctccactgtcac

SEQ ID NO: 94509 - DNA, 600 bp, Chicken  19866894473063_2
tggattctacttcaagcctggccagggctcaatgagggagcaaggaggtttgtatcctagtaggaccttacaccgtgcttctattgacacctatgtggccctgtgttcatggcctggcactggcctgtgcctgctgcctgtttgggtgtgggctcagagctctgacagaggtgagcagggatcatgggtatgctagcagaaatcccctyagaaaaccaattttattttgtccagtgttaatggggcactttgatttatgtaaacctcttatgttctgtattcttcttctcttgcaaaaaractgtggtgtgctcaaagtactggcttccacagaggttgttgggagcacagcttttaggtgagcacgagtgtatgtgcaggtggaagcttccaaaggctgcgtggccttggggctgctggtttgggggggcacagaggggcggcgaggggctctgccaggttgggctggctccagatatcgtgtggcacgcacagcgctccactgtcacttcacctacagcagatggtggctgaccagatccacttggctgacagcaaagcggtgtcctgtccagtgggtgggttgcagcatcagtcaat

SEQ ID NO: 94510 - DNA, 600 bp, Chicken  19866894473069_1
cccaaacttattctttgaagaacaagaaaatcacacaagagatgatttacacttcatttgggaatataaaagagtttttactcatttttattggaacagttaaataattaattttcaaattattaaatttataatgtaaaccagcgtagtgattaaactaatcagatatatcaagttcaccacacagtttctttgcaaagctgcatctctttagatttaggttattcccaggagtacaattattgttttgatagctcagctctgagatcacattagaaggcagctactcacactgagctsccggccacagaagtttctactcatttttctaccctagcttatctaagtttatatcctttgtgactcagctttcctcataactgcatatgagacattttccaaataaccattttattttctttttaatcacaaacagcacaacaaaaaggaaacaaatcccatagcagagtcactatgaagttgggaatactcagcatgaaattcataccatgaaacttctgaataagttcgctgaaattttttgttgaaaattttagaaaatatgtcctctcactacgtatgtctttwttttattttatt

SEQ ID NO: 94511 - DNA, 492 bp, Chicken  19866894473069_2
cacactgagctsccggccacagaagtttctactcatttttctaccctagcttatctaagtttatatcctttgtgactcagctttcctcataactgcatatgagacattttccaaataaccattttattttctttttaatcacaaacagcacaacaaaaaggaaacaaatcccatagcagagtcactatgaagttgggaatactcagcatgaaattcataccatgaaacttctgaataagttcgctgaaattttttgttgaaaattttagaaaatatgtcctctcactacgtatgtctttwttttattttatttttattttgaggacctgaccaatatctttaagaaattcagcttcttgcacgcttttacttctgcaaatgttgagtactgcaaatgtagtataaaagaatgcaaatctttgtcagactctctttggacatgatgagtgaacagctgttttaacagcaaattaagaatggaaaagcataaat

SEQ ID NO: 94512 - DNA, 600 bp, Chicken  19866894473082_1
tgtgactatacatgattagaaatcacttgttttataccagatgttgtgtcacttcccccgtggtactaaatgcactggcaaggtctggatagtttctagtatagatgcaggttcagaaatcttactcgttgctactgaagtatatggagtctttttgtgaaatttccatgcaaacaagtttgcagagaatatccacgtcaaggctgagtaatacttcctctcctactaggtgggctctgaattcatgaagcagggtagcttggtatgatgcagagggtggaaggctacctgtgcctccaycctgctttctccagtgtcacctgttgtagggaacatagaaactgatgcccccttatgtgctgttgatagtgattataggctagtgggaaagtgtaaaatgatgtattagaagggaaactgtacattctctccttatgtaacacagaaatggctctatgtgcagctgtctagaagatagctcttgtgaactattttgtgttaaagtaatgcaagtctgaatgaacataagctgtttaaaatggcagctaaacagcagtcatgatgcagtattcagactgagagtctcctgatatgatggaa

SEQ ID NO: 94513 - DNA, 600 bp, Chicken  19866894473082_2
gggaacatagaaactgatgcccccttatgtgctgttgatagtgattataggctagtgggaaagtgtaaaatgatgtattagaagggaaactgtacattctctccttatgtaacacagaaatggctctatgtgcagctgtctagaagatagctcttgtgaactattttgtgttaaagtaatgcaagtctgaatgaacataagctgtttaaaatggcagctaaacagcagtcatgatgcagtattcagactgagagtctcctgatatgatggaaaaggtgcagtgtgtggagagatcagcaytgcagtgctgctctatctctgtatttgtcaatgataaatgtaccacatttagaaacttgggtatatctggggaaaaacaaacaattaaaaaagaaaacctctttccttcatggtattttgctttactgtataagcaagtatgcaggctgttgtttaacacatcattttaagtgcagcttttacggtattaaaaacataaaaacattagggcattagtaaattgttttggtacttgctatctgcaattgtgtaaattacaggactcaagttagttctccatttcctactatgtagctaaaa

SEQ ID NO: 94514 - DNA, 599 bp, Chicken  19866894473092_1
  misc_feature (1)..(28): n is any nucleotide
nnnnnnnnnnnnnnnnnnnnnnnnnnnntcttgtgttttgacttgaaaacgatgatgacattttcaaacactggggagggggacaagaaacaaaaaacataagtctcattgtgagtaagttgtgtacagaatggacttcaaactagaaggcttttgctggccttgggcccttaacatctgtagagtatttgactctttcaaggcttcagttaaataggttttttgaaaaatacagcagcagtaggcgtggaggctattagaattttgtatgcatctaaatgccaaatgcatgatgcaaarcaaggacaagcaaattccatgcctacagtagtggtatttgtttgacaaatgatgttaaggatgattaggaaggaatatcatttgaaaaacaaatcaatgtacttatgttttcagattataatgttttggtcttaagtagaaatggttattcacaggatatgcgaagcagtatatgaactattgagttgctttttgaaagtaaataacaaatcttgttttgagctatgctgcttccagacttttctatgtctatcagttcttttcattagaaataacatttaaaatggtgtaaagctaat

SEQ ID NO: 94515 - DNA, 600 bp, Chicken  19866894473092_2
aaacaaatcaatgtacttatgttttcagattataatgttttggtcttaagtagaaatggttattcacaggatatgcgaagcagtatatgaactattgagttgctttttgaaagtaaataacaaatcttgttttgagctatgctgcttccagacttttctatgtctatcagttcttttcattagaaataacatttaaaatggtgtaaagctaattgcagcattttgcctattgctgtgcgattgcagaatatttaatcttgccttatgcaaaattgatgtggatattatgctgtggggttsataagtcttcattgactaaacatgctttttggcatgtgatccccatactgctccacagagacattttggagacagaatttatattgtttgtatagcatatgtacagcatttataatatcgctgaataacataaatttttgcttctgaacttgaatataaacatgccaaagtgactaaaatgttacaatgaaggaagagaagatttaaaacccaacaaggaatcaaaaaatgaaarattagattagaacaaagaaacatcactgttacacactgagtatgtttaatcagtggcacatctct

SEQ ID NO: 94516 - DNA, 494 bp, Chicken  19866894473092_3
tgcgattgcagaatatttaatcttgccttatgcaaaattgatgtggatattatgctgtggggttsataagtcttcattgactaaacatgctttttggcatgtgatccccatactgctccacagagacattttggagacagaatttatattgtttgtatagcatatgtacagcatttataatatcgctgaataacataaatttttgcttctgaacttgaatataaacatgccaaagtgactaaaatgttacaatgaaggaagagaagatttaaaacccaacaaggaatcaaaaaatgaaarattagattagaacaaagaaacatcactgttacacactgagtatgtttaatcagtggcacatctcttctctgtaacacactaataatcagtgcattgcaatgcaaatttaggtttcatcaatcatataattaatatacttcatgttctgcctgtaggtaatcctggtctactttgttctgtttctgtatgaccgg

SEQ ID NO: 94517 - DNA, 464 bp, Chicken  19866894473100_1
  misc_feature (1)..(53): n is any nucleotide
nnnnnnnnnnnnnnnnnnnnnnnnnnnnnnnnnnnnnnnnnnnnnnnnnnnnnatttttgctaatcatggagaaggaactgctccagctgagggcttctgtgctgcagcgacagagcacagcccagaggtctgcgtgtcccaggacggctgcagtctgtgcagacgggggtgcagccgggtgcccagggttgtggtgcagagcagggtccctgctgtgccccaggggctgtgtgccggggcagggactctgccgcctgccaggctcagcactcagcctgcctggggagctgcccagggcrctgcggggagacgtgtggggggaaggagccccccggcagggcaggagccttctgctgccacagctgctgcctggggcaggggacttacagtttacggtgctgcaaggcaaaaccaggcgactttaccacagaaatagggcagtgtttatctgcttcagtgaggg

SEQ ID NO: 94518 - DNA, 599 bp, Chicken  19866894473111_1
  misc_feature (1)..(81): n is any nucleotide
nnnnnnnnnnnnnnnnnnnnnnnnnnnnnnnnnnnnnnnnnnnnnnnnnnnnnnnnnnnnnnnnnnnnnnnnnnnnnnnnncatgcacacccacagaaagctttgacttttgaatattcttagcaacatttgtgctctgtggaattttccacgttctggtcccatgaatagtttcttacccagcagtgttcctttttgatcgcatccatggatttctaaaccttatcatattgagaacattggtcgatgattttttctttggcgtgaaagtctttccttgctgtcagtttggcagtggtkgatggtaccagttggactttcccaatctgatctatggaatattttccttttcctccaatagacacacatatcctgatgctyggtaggctgtcagaatgtaaacctggagcatcagatggtaacacgaggagtggcgcatctgcccggcctttttatctgccgtagtattcaaaagaaagtaaatgagatctgcagtaattatgcagtaatatatccacaacaaaaatgccttcctcatcccagcaatcagaatttggctttggtttgaagaatggaagggtatagcctgctgcctttgg

SEQ ID NO: 94519 - DNA, 600 bp, Chicken  19866894473111_2
catgcacacccacagaaagctttgacttttgaatattcttagcaacatttgtgctctgtggaattttccacgttctggtcccatgaatagtttcttacccagcagtgttcctttttgatcgcatccatggatttctaaaccttatcatattgagaacattggtcgatgattttttctttggcgtgaaagtctttccttgctgtcagtttggcagtggtkgatggtaccagttggactttcccaatctgatctatggaatattttccttttcctccaatagacacacatatcctgatgctyggtaggctgtcagaatgtaaacctggagcatcagatggtaacacgaggagtggcgcatctgcccggcctttttatctgccgtagtattcaaaagaaagtaaatgagatctgcagtaattatgcagtaatatatccacaacaaaaatgccttcctcatcccagcaatcagaatttggctttggtttgaagaatggaagggtatagcctgctgcctttggtgtgtttgcagcaaagcccgggctggtgtgcactaccatagctttgggatagacaacagagctgtgccagctgatatcactc

SEQ ID NO: 94520 - DNA, 600 bp, Chicken  19866894473118_1
caccagctctgcagtgatcagagatcccttttggtgctttctcccttggtggcacatgctgcctttgactttaatagttaaaatgaatccccctattactcatatcctcaagcacccctaaaacaatctgacagaacataacctacagtaaacagtgtttctgaactaaacgatatcccagcacagagggaaagtgcctaaaaaacattctctgtttccagattgtgctacaatgaggacctgcaagcagcagcattcacattatttgtttcagatgccaccatatgctcatgggagatkcagggcaaggggcactttgactcttcacatgccaagaggaagaaaatcaatttcaatacccagggggagaaattactacaagagaaggtcactcactactacaagctgctccattatcatgtagtcttggaaggaatcctacaaaaattagttagctgttgagtcttagctgctaaattataagtaacctggattaacataaaagatacatagggagactaaactttaagtaagatctgcttatatatgtttgttctgttaaagagtttagggtaagatgctgtttgatactgaaggtca

SEQ ID NO: 94521 - DNA, 600 bp, Chicken  19866894473127_1
tgcatggggtgatgggggtaacttcagtgccaccagctgcgtgcacagtgggtgagatctcctcttcccctctcccgcagcagctgcacccaaatgctccatccctgtgccccacacaggtgctgggagctgtggtcaccactccccacctgcgtcctcgtcctcgctccccacctgcgtcctcgtccccgcgggcgcagataaataacccggcgtgccttgccaggagccaggcacctgctgtgtcctgcacattccctgcctatgcccacgtccccatgcggctctgtcctgtccccktggcagtggggtgcacgtgggggtgcctgggatggggatggggacacagacagtgacagggatgaggatagagatagggatagggatgggaatgggaatggggatggggacggggatgggaaatgggatgtggacagggatgggggtggggacggggacagggatgggccggctgatggggacatagggacatggggaaggggagctctggtatatcccccagtgccaaggagcagagcggagccagaggcggctttcctccgcctgatctcgcggcttttcagcctgctggggaagggc

SEQ ID NO: 94522 - DNA, 600 bp, Chicken  19866894473130_1
ggagacctacacaagtagaaaggaagacaagactgagaagtgtttcatttgtaatgtgctgaacagacaaaaatcagcgtcaaagaattaaactacatttgaattgcaaagtaagacttaaataaggacacctatgagtagttttaaatgaaagtttttgcagatgcacacattttgggacatttccatttctcaacttttcctttatgttctccacttttattccactctatttttgtgtatacaacggtatacaattaaactgaacagaataaggaacaaatctttcaatacagttcwtttgtttattarttattcagcatgctcttagagaaatcagtgtatgacaacttcaagagatcatatattacagaaatccaagatattatccatttctgtagcacacaagatctttcttctgaccraaaccttacagacagtttatgcaattcagttatattagaataattattttagttgaaatcatagtactaactactacrcaaaaattctttgacacaaagctggcaataattgaactgattttaagattgatactacaaaaatcagctgtttcaagaaaatwaacttaatggagac

SEQ ID NO: 94523 - DNA, 600 bp, Chicken  19866894473130_2
aagtagaaaggaagacaagactgagaagtgtttcatttgtaatgtgctgaacagacaaaaatcagcgtcaaagaattaaactacatttgaattgcaaagtaagacttaaataaggacacctatgagtagttttaaatgaaagtttttgcagatgcacacattttgggacatttccatttctcaacttttcctttatgttctccacttttattccactctatttttgtgtatacaacggtatacaattaaactgaacagaataaggaacaaatctttcaatacagttcwtttgtttattarttattcagcatgctcttagagaaatcagtgtatgacaacttcaagagatcatatattacagaaatccaagatattatccatttctgtagcacacaagatctttcttctgaccraaaccttacagacagtttatgcaattcagttatattagaataattattttagttgaaatcatagtactaactactacrcaaaaattctttgacacaaagctggcaataattgaactgattttaagattgatactacaaaaatcagctgtttcaagaaaatwaacttaatggagacagtgttagataa

SEQ ID NO: 94524 - DNA, 600 bp, Chicken  19866894473130_3
ggacacctatgagtagttttaaatgaaagtttttgcagatgcacacattttgggacatttccatttctcaacttttcctttatgttctccacttttattccactctatttttgtgtatacaacggtatacaattaaactgaacagaataaggaacaaatctttcaatacagttcwtttgtttattarttattcagcatgctcttagagaaatcagtgtatgacaacttcaagagatcatatattacagaaatccaagatattatccatttctgtagcacacaagatctttcttctgaccraaaccttacagacagtttatgcaattcagttatattagaataattattttagttgaaatcatagtactaactactacrcaaaaattctttgacacaaagctggcaataattgaactgattttaagattgatactacaaaaatcagctgtttcaagaaaatwaacttaatggagacagtgttagataagcctttttctgacgatataaaactggagaaaggatcaaaagaatgtcagggaaaaaaaagataaacttgaatcatgatgagaaaattaatcaaagttttgcttaaagtgtttt

SEQ ID NO: 94525 - DNA, 600 bp, Chicken  19866894473130_4
tttatgttctccacttttattccactctatttttgtgtatacaacggtatacaattaaactgaacagaataaggaacaaatctttcaatacagttcwtttgtttattarttattcagcatgctcttagagaaatcagtgtatgacaacttcaagagatcatatattacagaaatccaagatattatccatttctgtagcacacaagatctttcttctgaccraaaccttacagacagtttatgcaattcagttatattagaataattattttagttgaaatcatagtactaactactacrcaaaaattctttgacacaaagctggcaataattgaactgattttaagattgatactacaaaaatcagctgtttcaagaaaatwaacttaatggagacagtgttagataagcctttttctgacgatataaaactggagaaaggatcaaaagaatgtcagggaaaaaaaagataaacttgaatcatgatgagaaaattaatcaaagttttgcttaaagtgtttttaaaagtcttaccagtttacggaaggttctgtgaatagtctgtttttctctcaaatttccattatagaaagcaatttc

SEQ ID NO: 94526 - DNA, 570 bp, Chicken  19866894473130_5
ttcaatacagttcwtttgtttattarttattcagcatgctcttagagaaatcagtgtatgacaacttcaagagatcatatattacagaaatccaagatattatccatttctgtagcacacaagatctttcttctgaccraaaccttacagacagtttatgcaattcagttatattagaataattattttagttgaaatcatagtactaactactacrcaaaaattctttgacacaaagctggcaataattgaactgattttaagattgatactacaaaaatcagctgtttcaagaaaatwaacttaatggagacagtgttagataagcctttttctgacgatataaaactggagaaaggatcaaaagaatgtcagggaaaaaaaagataaacttgaatcatgatgagaaaattaatcaaagttttgcttaaagtgtttttaaaagtcttaccagtttacggaaggttctgtgaatagtctgtttttctctcaaatttccattatagaaagcaatttcttcactttaaaaaaaaaagtgaaagaaggaaacatcatttttttttaacaatg

SEQ ID NO: 94527 - DNA, 600 bp, Chicken  19866894473140_1
taagctagcagcaaagggcatcaaccttgtagagagaaaaatacagttacatgatataagaattacaattagatacagcagaaatggatacagtagctgtttagctatctactcagctgttacagatgctgttcaagcagacaatgtctcatacttcaaaccggaatgagtgattttgtatatgttaggcacccactcggaaatgttgaaaagatcagttttctaagtgaaaattactgaagaaagatcttttgcaatgctgtaatgaatgcctggcacattttagaatgcttattaagrcattatttctcatttcaccacacccatcagaaattccatggcaataaatgaaatggatttggaaattactgtactgcatagctaagacaaagagtgtaccacagtcacactttccaaaacagaggttgagtttctttcaatcatttttccttcagaatttttatgataattctaaaaatctattaccagattgcagatatggacatggaactgttgaagtgaaagtcaaagtagtcgtctgtagattcttaatataaagacaacaacatgcaaagctgcatatccttgagacagcggtgg

SEQ ID NO: 94528 - DNA, 600 bp, Chicken  19866894473154_1
caggtcagagtaatacaatgtacaaatatgaactaataaaaatgtacatatgattgttttcaggagcttcagttttaaaaacatagaaatgcagtgaaatcatatgaagtaggacagaacttttccttagctgtttttacacggtattatgaaaccagaagaaaaaataatagccctattttgatttttgttgacttccttttgagaccgtagtgaatgaaaatagaaggctaacaaagtgacctaaagaaatacaaaattattgatatatgtgtaaaatatcatataatgaaatatatrctgctacaagaaaagtgttattttatcctcagataattaagccattctcatgatttttagggatagacaggcttgacttgtttgtcttgatgctggcagtgctgctgttttcaaccagtgttgctgttttcaaccagtgttgctggtttccacacattgaaatccttaggaaaatactctataatgatagttatgcatagttcatggcttcttaatattgttgttcttgctttttttccccctggtagtcacatgttgagaaaattaaacagttttaacactgcgaaaaatctacagaat

SEQ ID NO: 94529 - DNA, 600 bp, Chicken  19866894473154_2
ttctcatgatttttagggatagacaggcttgacttgtttgtcttgatgctggcagtgctgctgttttcaaccagtgttgctgttttcaaccagtgttgctggtttccacacattgaaatccttaggaaaatactctataatgatagttatgcatagttcatggcttcttaatattgttgttcttgctttttttccccctggtagtcacatgttgagaaaattaaacagttttaacactgcgaaaaatctacagaatagattttgtggaggttctagtatttagtatatattaagcagacrtttagtattcagcaaatattttaagaacatgtgactgatgctgtatttaaacctgccatatggaaacaggtcaacatttataagtgtagatgcttacagttaaccactaattgttctgagtgcttagagaattcatttatttcatcacaacttatagatgcttaaaacatcttaaattaggctgcatacttaactgcccaaactaataaattagcgtttgactgtaagcccagaaatatattttaaaaaggcgaaaaaaaaaaacaaaaaaaaacaccaaaaaaaaaaaaacccaaccca

SEQ ID NO: 94530 - DNA, 600 bp, Chicken  19866894473160_1
accgtatggggacggctggacctgagccgggggcacattgcgagcaaggggaaaaataaaccttaaacaactcctctttggggctgaaagcagcaacgctgtgacccccacccaacccaagggagcagagcgaggtctgtgcccgagtgaggaataacacggaggacggagagcgaaccttaacacacaatgaacgcccaaaccgcacacgcagaaataaggatttcgccattggaaatgagttatttaaggagaaattgctgcaattttgcacacagcccagcagacgaacctcaccaratgtatgcacgtatggatccggatggccccaaccccgggtatgtggggcagctgcatggacagacagaaggataactggtgctgggatggtgcttgcagccctgcaacccacctccaccccacagcccaccctcagcaatggcaccgggtgtgcagccgcaggggttggtgcccagggaccgtttgtgcattagagatatacctctaaaacacctctgttgctgcacggtgacagctctgcagccatacctggagccgtccctccttcacccaccacccatcttctgcacggctccggga

SEQ ID NO: 94531 - DNA, 600 bp, Chicken  19866894473162_1
cacaggctccctctgggtgtgtaatatccttgtgtaatatcaactgtaccattaagttttctcatctgcaaactttctgaaggtgcactcaatcccatcatctatgtaattggaaaagatggtaaagacaaaatcttgggggacaccattcatgactagcccccatttggttatagatccatgagtattgctaaaattacttttagcttttgtgattctccattgaatttatttggatgatcaatcagtagatttactattttaattttggagaaagacagaataccttttttttttttytaatttcttttttgcctatccaaaaactctgttaacaaaatcctttgcatttttcttccatctttcctaatgtgtttttaagcagttaaactggttaaggaatccagtgacatttaagtcttttgtgtcagcaatttacaaagtaattttggtattttgtctaaaaatgtgtaaaaacaaaagatctttcacaagtcagagatgggattttcaggaaatggacttctattcagaacctctaggacagaagtgacactgatgaggaaagacacagtctgcataactgtgctggtgatgtat

SEQ ID NO: 94532 - DNA, 600 bp, Chicken  19866894473165_1
tggcatggctggccagcaactgagcctcatccctgacaggatgcccagatcagcccatgggctgcttgcagggagagcactggtaattagcgagcaacttcaccagtgattaacagcagcaatgacacccagtgaacttagagggtccgtggtacgttgggcttcaagcagccacgattcagtagcgtggtgcacagaaaaggactggatgtcattgctctggggctcacccatcctctgaaactgagaagcgtacgggaagccaaagatgagcttaggaggggaacagagatttctcaytaaaygcacgccttcatctatgagtgtttgactgaatgaaaatgccctttgtcttgaagctgccggtgttgctgagcagcttaatctgctacatcactgaaaataaagcttgaagggactcagatatttttatcccgtcctctgcctgcaggcaggatgaactctgcctgtcgctcctgatgggctcgtccaacctgttccaaacagcctccgacaacgggggtttcacaatcctcccaggcagtttatttctgtatttcaccctctgccctcctaaactttttttctgctatccaagct

SEQ ID NO: 94533 - DNA, 600 bp, Chicken  19866894473165_2
tggctggccagcaactgagcctcatccctgacaggatgcccagatcagcccatgggctgcttgcagggagagcactggtaattagcgagcaacttcaccagtgattaacagcagcaatgacacccagtgaacttagagggtccgtggtacgttgggcttcaagcagccacgattcagtagcgtggtgcacagaaaaggactggatgtcattgctctggggctcacccatcctctgaaactgagaagcgtacgggaagccaaagatgagcttaggaggggaacagagatttctcaytaaaygcacgccttcatctatgagtgtttgactgaatgaaaatgccctttgtcttgaagctgccggtgttgctgagcagcttaatctgctacatcactgaaaataaagcttgaagggactcagatatttttatcccgtcctctgcctgcaggcaggatgaactctgcctgtcgctcctgatgggctcgtccaacctgttccaaacagcctccgacaacgggggtttcacaatcctcccaggcagtttatttctgtatttcaccctctgccctcctaaactttttttctgctatccaagctgtatt

SEQ ID NO: 94534 - DNA, 600 bp, Chicken  19866894473168_1
aatgtctccagttggtaacaagtgcttggagaatcggctgctgtctcagcccctgcactggaagggaatcctcctggtgcagctgatccagcctgcagctggggacacttttctctttctgctctgtcctcagattttgcttgagactgagtttgtagcaccacaggtaaatggaatttaatacgatttattattattattttttttaagcgcaaccggcttaaactttgttttcatttgctgctcaaatgatgacaattaacagctgcagatgcaagaaaggttagtccctctattacrtttgcagggaacgcgtctaaaatatttgcatgctaaagctgccttytgcaaatgagttcccgaagatacaagttgctgtgacggaaatagtgtattaaaaacacttttaataattgactgcgtctttatcaattgtagcgaagaaaaaggaattgttctatgggctttttgacttctgaacgtattggagctctgtgatactcagcaagttgtctggcgctgtcttcactgaagacttttatgtaatgaagaggctgattgtcatatttttgtccatgctggaggccaataacccaaccc

SEQ ID NO: 94535 - DNA, 600 bp, Chicken  19866894473168_2
cagcccctgcactggaagggaatcctcctggtgcagctgatccagcctgcagctggggacacttttctctttctgctctgtcctcagattttgcttgagactgagtttgtagcaccacaggtaaatggaatttaatacgatttattattattattttttttaagcgcaaccggcttaaactttgttttcatttgctgctcaaatgatgacaattaacagctgcagatgcaagaaaggttagtccctctattacrtttgcagggaacgcgtctaaaatatttgcatgctaaagctgccttytgcaaatgagttcccgaagatacaagttgctgtgacggaaatagtgtattaaaaacacttttaataattgactgcgtctttatcaattgtagcgaagaaaaaggaattgttctatgggctttttgacttctgaacgtattggagctctgtgatactcagcaagttgtctggcgctgtcttcactgaagacttttatgtaatgaagaggctgattgtcatatttttgtccatgctggaggccaataacccaacccattcattatcagaagagagtagcctggaagttgcaacgtcaggacc

SEQ ID NO: 94536 - DNA, 600 bp, Chicken  19866894473177_1
ggtctgggtcattggaaattaacatagaggggcagaaaaccggttggatgcagcctggatgagcacttgctgttctgttgtgtctgtggcatgcaggtggtgcattcttgtgcttcagacaggcagaactgggtgctacgtgggagcaccctgacagatggcactgctatcccctctctgtcactggaagtaagagggaatacagtggttacgtggcttcttcccagctgacagcacaatggggagtactgggtttttgtcccatcccacatggttggatgtggactgttgcatgctgartggattggagcagatagctgagagtgagcagtgcacggataggttttggtggggaccgtggccccagagatccctattatattccccagaagagccaaagcacctggagcaaacactgtggcactgctccctgaagaactgggtccccagggctggtgtatgcctatgaaaggggagtgggaagagaagaagctgtgttccaaggctgaggtgaggacacccagactctaaggctgctatgcatgggaaaaggacaggaggtgtctctgggaggttattccccactgttggggcattttg

SEQ ID NO: 94537 - DNA, 548 bp, Chicken  19866894473186_1
tggctgcttttacagtacaggaacacagttcgattcagtttatgttggttctgtttaaagtagtttttcagctatatgactgtaatcttcctgtagaaacttaaaagaaatagagttaacaagctgcttctcagcttgctatctgattgagagcataaactgacaggaaggtcttagggatgataagtgatgagaaactcaacatgaaccagcaatgtgcacttgcagcctggaaggacagagctatgctaagctacatcaaacaaagtgtggccagcaggtcgagggaggtgattgtcwtctggagtaatgtgtcctgctctatgactctcaaaagtagaatgatatggatctgttgaagtgagtaaggtgtaacggctttaaaccaaaagagagtagatttagattaaatagtaggaaaaaatacttaactatgagagtgacaaggcactggcataggctgtggggtgtgccatcccttggaagtgttaaagaccaggctggatgcagctctgagcaacttggtgtagtgggaaggtttccctgtt

SEQ ID NO: 94538 - DNA, 600 bp, Chicken  19866894473196_1
ccaaataagccatacttcccttgaggctaggacgtgaccgggatccacatccaaaatcaacagcctgaaaattctccctggatttactttattaaaatcaaaaggttattatctggggaggaagcggaagggtgagaatctgaatgactagcagtacttgcatccttaaatcatgacagggctgcccatatagcaatctgagtatactaacaaatgggacagatactactttggaagcagcttctttttagacttccaccttgtgaaagaaacagatcacacccatttgtgaagacatcytaccctgaatttcacaacatttatctggcagctgtacaaattaaatgttataactttattacagaaggattctcccagagctgaaataccagttgaacaagtcactgaaaagtcaagatgaacaggaaaaagtttgtaaaacaggaaaggaacaaaacaaactctccaaaaaactaattgcacagtgagttacggtaaacataactggcaacatctagaatagtatgtcacaatttgctaattctaaatttgttgagtatttaagaaagtcacagtaaaaaaaaaagttatttacagtac

SEQ ID NO: 94539 - DNA, 409 bp, Chicken  19866894473198_1
caatccctgcattcagcacagtacttctcattgtatttacagattttctggagctaagctttcaggtatgtgcaaactgagtgaggattaagatccatctgatttcacaaagcatacagactacatccaccagggaaagtgtgacagcttggctagggaagggtcctggccgagtgatcatcactacaacaaggggtttttcccttgtctcccttttcttcctctttcaatccgctcttgctaagaaagctgagggcttgcttgtactaacagtgcctatttccctttccctttcccttmctctttcctctttttctatttcttttttgttttttttttttctatttctattgacatatgtttctattgccatatatttgaaggacatctgaattgtcagagcaatttg

SEQ ID NO: 94540 - DNA, 600 bp, Chicken  19866894473200_1
aatccccccatcctccactgggttcatagtttgaatcagaaatcagggacgttttcctttagaaaatgtgaagcagtcctcatccattgaatcactgggtcattccagtgtgtgtgtatatatatatatgtatatatattctcttaacaatgcgctgtgttaattgcttgctcgctgcacgtggtcagctttttatgtaaagcaatcaggccacaccaagtcattgcatgacacagccactgcagcagtacaagaacctcgtggagcctcagcaagaaccaaactgctgctggggatggygtaggcagaaccacatctctcccttcagcccagccttgctcaccctcaaatatatgtgtgtaatagcaagaacacgttgtcctaaggccacttatctctctaacagttttcttaatctttcatttgtttattttttcctcatcttcaggaaattagtactggtgcatttgttttaagggagagcagggaaagggagtgaaaattggttgtgtggtcgcttggctctgggaggtagaagtgaatcccaaagccatggccagcccatgagagcagctgcatgccaagggcagaatccccact

SEQ ID NO: 94541 - DNA, 600 bp, Chicken  19866894473205_1
aggccagctcagaacatcgctctccctgctgacacctgctgctccaacagccttcacatctacctgcactccttgcacacatcacaagtctggggtctactttgtactcatttttgggatgtgaaggagcacagtgtgatcctgagaccaaagaaaacacctctgtccctccacagtgtgctttcatggacttcttacctatacaggctctcacagatggttgcaactgcttgtttatgtatttaggcagatactactttcattttatacacaataataaaaagaaggcatagaaataawaaataatttgtccygagtaatraagatactgttaaaattaagactagaatctaagcyttttggctacttctcaagtaatctactgccctcttactgctatttctgcccaacatgctttttctcatcatttgttggtgcatctgacacagatggggttaatcttcagtgaaggcagagggatttcttcctctgactgtctcactgcttttcccctactatcctgccagaatgcatcctgattagtgtcacttctttaaatatttgagattgaacacaagttaaaatagatgccattctgta

SEQ ID NO: 94542 - DNA, 600 bp, Chicken  19866894473205_2
catcgctctccctgctgacacctgctgctccaacagccttcacatctacctgcactccttgcacacatcacaagtctggggtctactttgtactcatttttgggatgtgaaggagcacagtgtgatcctgagaccaaagaaaacacctctgtccctccacagtgtgctttcatggacttcttacctatacaggctctcacagatggttgcaactgcttgtttatgtatttaggcagatactactttcattttatacacaataataaaaagaaggcatagaaataawaaataatttgtccygagtaatraagatactgttaaaattaagactagaatctaagcyttttggctacttctcaagtaatctactgccctcttactgctatttctgcccaacatgctttttctcatcatttgttggtgcatctgacacagatggggttaatcttcagtgaaggcagagggatttcttcctctgactgtctcactgcttttcccctactatcctgccagaatgcatcctgattagtgtcacttctttaaatatttgagattgaacacaagttaaaatagatgccattctgtacattctgcacaaac

SEQ ID NO: 94543 - DNA, 600 bp, Chicken  19866894473205_3
tccctgctgacacctgctgctccaacagccttcacatctacctgcactccttgcacacatcacaagtctggggtctactttgtactcatttttgggatgtgaaggagcacagtgtgatcctgagaccaaagaaaacacctctgtccctccacagtgtgctttcatggacttcttacctatacaggctctcacagatggttgcaactgcttgtttatgtatttaggcagatactactttcattttatacacaataataaaaagaaggcatagaaataawaaataatttgtccygagtaatraagatactgttaaaattaagactagaatctaagcyttttggctacttctcaagtaatctactgccctcttactgctatttctgcccaacatgctttttctcatcatttgttggtgcatctgacacagatggggttaatcttcagtgaaggcagagggatttcttcctctgactgtctcactgcttttcccctactatcctgccagaatgcatcctgattagtgtcacttctttaaatatttgagattgaacacaagttaaaatagatgccattctgtacattctgcacaaacttctcttt

SEQ ID NO: 94544 - DNA, 600 bp, Chicken  19866894473205_4
atctacctgcactccttgcacacatcacaagtctggggtctactttgtactcatttttgggatgtgaaggagcacagtgtgatcctgagaccaaagaaaacacctctgtccctccacagtgtgctttcatggacttcttacctatacaggctctcacagatggttgcaactgcttgtttatgtatttaggcagatactactttcattttatacacaataataaaaagaaggcatagaaataawaaataatttgtccygagtaatraagatactgttaaaattaagactagaatctaagcyttttggctacttctcaagtaatctactgccctcttactgctatttctgcccaacatgctttttctcatcatttgttggtgcatctgacacagatggggttaatcttcagtgaaggcagagggatttcttcctctgactgtctcactgcttttcccctactatcctgccagaatgcatcctgattagtgtcacttctttaaatatttgagattgaacacaagttaaaatagatgccattctgtacattctgcacaaacttctctttgtatgattttctaatgcttttcgttcatctgctgc

SEQ ID NO: 94545 - DNA, 584 bp, Chicken  19866894473207_1
tgtgagaatgaacaaattcagtctttgaaggaaacacaagtttcacccacagaagatgcttagccacaaaaatgcaaactagatctagcatatttaattgtacagtactgtcaaaaagatgttttctgctgttcagtgagataaagtagctcatcaaactgccaaaagccagcaccaaagctatcaggatttgtgggtgcagaagaataaaccaaggaagattcaagcatgtgctgaaggaagagctggagagatagaagtaatcaggaaaccaacccttttatttttagtagcagcaayttattagatcagcctaggttcaatcacatcttaagggcctgtaaggacattaagagcttgcataatgacagtgtgtattgcagtaatcagatgttactgtttggggaactgttaatattgttcacttggatatacgttataatgttattaggaaattttcatttgagccctattaggtccattttgcagaggtttgaaaagctactacatgccagtgatagaagtccgtggatgttttggatccaggaacgtgttacaagaccacagagcatgatcatgttcaa

SEQ ID NO: 94546 - DNA, 600 bp, Chicken  19866894473211_1
gaaattgagggcaatgctaaagaggaaatgctatgatacggccgttcgatacttctcatcataattgcttggattttttttttcttcccaggtcaaaaatgctcttacataacctgggaaagctttattttgcatttgactgtatctttgtaagttaaacttcagtatggcgcagtatttgctagctttgtaaatgtgataaatacatttcctttcatttacgtttatctgctgtttcctctccttctcagcacttctatactctacaggctgatatctggagctctaatgccaaaattwgtattgtgagccttgattatgtccagctcataataagagacctgtttctgttgccttgtcccctatacttcattttatttacattcattttatatatagactattattaaaatcctgtatttcaggaaaacatgaaacatggcattgaatatgtaaagcagagctacagtctcccatcttacagcacgcatttcttttttttttctctggtgagacatgtagaaacaggatccaaatgggaaccatccrcataggatctgatgaaaacagaaaatagagccaactttgccttccagttat

SEQ ID NO: 94547 - DNA, 600 bp, Chicken  19866894473211_2
agcacttctatactctacaggctgatatctggagctctaatgccaaaattwgtattgtgagccttgattatgtccagctcataataagagacctgtttctgttgccttgtcccctatacttcattttatttacattcattttatatatagactattattaaaatcctgtatttcaggaaaacatgaaacatggcattgaatatgtaaagcagagctacagtctcccatcttacagcacgcatttcttttttttttctctggtgagacatgtagaaacaggatccaaatgggaaccatccrcataggatctgatgaaaacagaaaatagagccaactttgccttccagttattaaatgctgtggcagaagagaccatgagcacaaggacagtgagaggacaggatgcagtgttattttgtgtatattgttttgggttattttgtgctccggggcctcacatgagaggacataaccaactactgcagcacagtgtctcctgctctcrgcgctggttctgctggcagcaagtttygttttttaaccttttgtgtgccactgaaagaactgcttaaacaaagaaatgaggtcatggcagctttt

SEQ ID NO: 94548 - DNA, 600 bp, Chicken  19866894473211_3
aaagcagagctacagtctcccatcttacagcacgcatttcttttttttttctctggtgagacatgtagaaacaggatccaaatgggaaccatccrcataggatctgatgaaaacagaaaatagagccaactttgccttccagttattaaatgctgtggcagaagagaccatgagcacaaggacagtgagaggacaggatgcagtgttattttgtgtatattgttttgggttattttgtgctccggggcctcacatgagaggacataaccaactactgcagcacagtgtctcctgctctcrgcgctggttctgctggcagcaagtttygttttttaaccttttgtgtgccactgaaagaactgcttaaacaaagaaatgaggtcatggcagcttttggacaattcttctcttggttcgttcagatttctgagacagagctttgctcattcctgccggcatgcacttcttttcccctggtagaaggtcagagagtggcacaacacgcacacaaacagtcacagatgagctcatgtttgagctgttggtggcagatcagaacaaccatggggaaggtggtgtaggggggagaaaggcttcctt

SEQ ID NO: 94549 - DNA, 600 bp, Chicken  19866894473211_4
cagcacgcatttcttttttttttctctggtgagacatgtagaaacaggatccaaatgggaaccatccrcataggatctgatgaaaacagaaaatagagccaactttgccttccagttattaaatgctgtggcagaagagaccatgagcacaaggacagtgagaggacaggatgcagtgttattttgtgtatattgttttgggttattttgtgctccggggcctcacatgagaggacataaccaactactgcagcacagtgtctcctgctctcrgcgctggttctgctggcagcaagtttygttttttaaccttttgtgtgccactgaaagaactgcttaaacaaagaaatgaggtcatggcagcttttggacaattcttctcttggttcgttcagatttctgagacagagctttgctcattcctgccggcatgcacttcttttcccctggtagaaggtcagagagtggcacaacacgcacacaaacagtcacagatgagctcatgtttgagctgttggtggcagatcagaacaaccatggggaaggtggtgtaggggggagaaaggcttccttttaccgaggcaggattttgtgatgtgg

SEQ ID NO: 94550 - DNA, 599 bp, Chicken  19866894473215_1
  misc_feature (1)..(53): n is any nucleotide
nnnnnnnnnnnnnnnnnnnnnnnnnnnnnnnnnnnnnnnnnnnnnnnnnnnnnaaaaaaattaaatgtcatctgattggatcaaaagtattaggtgaccatccttgttatgctagaaagataaattttcatcacaatcattttgcaaaacagtagatgtgtgtgtatgcaaacgtgcaagtacacctatgcatacgctctgatacagcttatgattagcttatatctacttcctaaagcttgggtgttttttttttaattggtattatttttgcataagaagaaacagtgtgtgttaagytaagtgccattggaggaaacaggcaaggataaactcaaactatgatgacttgtgagcagatttcaataatccttttacaataagaaatggcaaaactgaacaggttggaataaaagttcaaataaaaccttccattttaatttgaatctccttagagtacaggcagatctgtataggcctagaaacaggaataatcagagagaagccaggaacaggacttaaagtcagcattgtatgaaaattttaatgagaacaaactgtatacctattccaaaagtggaaggaatcagactagctag

SEQ ID NO: 94551 - DNA, 600 bp, Chicken  19866894473236_1
gcttatactttaacataaatataccttgccaaaacagtaagtaactgactgttttaggctttgttagcctcactaaggtcacatcttagattgattgtaagctttgttagcttcactaagattatgtcttaggtagaatatgaacatacaatcccttagacataaactgttgccaagtcaggaactaggagtggatacagcctcacctaggcaccttaactccatggctcaaggactttagaaagcaagagggtcctttctgaacctcatgactcagctggagggcctcctgtatgtgcrtgtttaaatctaacctcaatgcagtaaataattaagtgtatccagacatctcaaatcttgttaagtcactgacttagttacaattaagctttgttaaatcactatattgtatccatattatatcacgtaaatagcttctctcctatgagtgcagtatagcatagttgttttccatccacaacacattcttttagtttaaaaccgtcacctcttgttctgccactacattctctgacaaagagtacctcctcatttgtcctgtaggctacattaaatatcaattacataacaattgtgtca

SEQ ID NO: 94552 - DNA, 600 bp, Chicken  19866894473244_1
cccacatatctccactttgtcctgaaattctcccagctccacactttttacaaaagtcagctcaacctcctgccctcctatctattgtcctcacattttcattaaaaaatgaatttgcttttaaggccaggaagcatttgtttagcatatttttaatcttaaaaaaaaaaaagcctgtacccttctgtgacgtctttggaatccctgcccaaaaatctagcttcagtgagctgctgaatccgatgctgtggtggttcccagcagccaaggcatgtcagctctccattcagagtcacagasgaagtacgtgacttcagtcaattcctgtttatgcttgtttatgtttatgggacttctggctagctacagctgtcattcaggaaccacagataaggagcagggattctgctgaagaagcttcaggacaaatttgtctctcttgccttttgcttggtgctttgtggtgtactatccatcaagaaataaatagcaaagaaaaggcaaaccgtaaggctgaatagaacagcttgcttcagaacacagagggtaagagagaaatttccttccctatgggcttcaggaggaaacaaacactgatgg

SEQ ID NO: 94553 - DNA, 600 bp, Chicken  19866894473248_1
cagttactgaggaggaatactgctgaatggaccagtaactgtggagatcttcagctactgtctggacatcctaggcaatctgaggcagtctgttctaggcatccctgcttgagcagggaatgtggaccagacaacctctagaggtccctgccaatcgatccatatcctgtgattcttacgacactttgctttgctacaaggaagctgggctatggactatgggctgaggtatataaacatttgacacttctgggactatgtctagactgctgtatttttattagggttcccctctacaaraaaggtattgacatactggagtgagctcagtgaccaacgagacaatggtgaaggaactcaagcacatagcatgtgaagaaatgctgagatgagggaactaggcttgttcagcctagggaagagacagctgtcaactcttggagatgcataatgatcagtcaggagaaaacagatataagaaaggaacttccaattagatgtaaagaaaatgagaactcacccagagggtaatgaagtactgaaacacgttgccctgagaggctgtaggattactattcttggattagatatattctctat

SEQ ID NO: 94554 - DNA, 600 bp, Chicken  19866894473253_1
tctacttgaagccctactttattttactccactgagatggcttactgccagctgcagagatggcaatacaatcacaacctacagacacactggtcctagttaccctgacatcagtagtctgcgtttatagatcttttcccgtgtattaagttcacaaattcatctaagaaaaccctttgtaactgtgaagttgtgccatgaacaaaattaagcagcggacattcatctgtctaaaccttcctcagctcagctgaaatcagtagagctatatttctttagatccagtctagttcaagatcratgtcacacgcctaatggagtacatacagtaaaagagaaatggtaaaaatgtatgtatacatacacatacatatgtatactcatatagggatgaagttacagcacgaacatcccaacagactccatcattttgcacactaagagggagaccaaactgtggagacctgggaactcttcctgtccagagggatacttgcagagaggtcacttttttgttaggatgaatttctgcagcaaaaagtactaataatgatgatgtattggatgttctgtggtttccaaatttcaggctacgtgctg

SEQ ID NO: 94555 - DNA, 520 bp, Chicken  19866894473265_1
acaaaaacaattcccaaaaatgcattattaatgggtattcccagaattaatgataaaacaaaccagatgttctcgtacatttgcctcataaatgcaaagtcaatatgccaaaccaaaaagccatctttggaaagctatggactatttatgaaggcgatttagctgtatttccccttactataagatatagaattgcttatctataagacaaccttgctatggttttatgtctattaatgaaaaaaagtctcttgtccaagaggaaatgcaggtgaaatttatgattttacatagcttgartttatgatagagyaaatttcggaccacatttcaagttacatgtataggtttctgtaaaaaaaaggaaaatacagattacatgaagaacaccagacataatcacgacgccctaatactacagatctgcttaaaatatggtttaagccccccaaaaacttcaccaaataaattttagctgcattatttagtatttatccttcacagagtataattactcaca

SEQ ID NO: 94556 - DNA, 507 bp, Chicken  19866894473265_2
ccaaaaatgcattattaatgggtattcccagaattaatgataaaacaaaccagatgttctcgtacatttgcctcataaatgcaaagtcaatatgccaaaccaaaaagccatctttggaaagctatggactatttatgaaggcgatttagctgtatttccccttactataagatatagaattgcttatctataagacaaccttgctatggttttatgtctattaatgaaaaaaagtctcttgtccaagaggaaatgcaggtgaaatttatgattttacatagcttgartttatgatagagyaaatttcggaccacatttcaagttacatgtataggtttctgtaaaaaaaaggaaaatacagattacatgaagaacaccagacataatcacgacgccctaatactacagatctgcttaaaatatggtttaagccccccaaaaacttcaccaaataaattttagctgcattatttagtatttatccttcacagagtataattactcaca

SEQ ID NO: 94557 - DNA, 600 bp, Chicken  19866894473267_1
atttcgctggcagctcgatcgttaaaattaaataggaggtggcaaagctgcagggcaggcaatgctatacattcatgagtgaaaatcaacagtgggcttgggtattatggacacttataaaccctgctttagtacctggtaaaacggctcaacagggtagttatgacagttatattaacgcagtgcaggaggcacacattagtatggtacttacatacgaaacatgggcacctccatattttctataaggagaactgagactcgtaggtgtaattaatttgaattttcaaaaagcctttsctaatattaatcaccgcggcctattaaggaaactagtcatggggtgagaggtaaacatctgtcaatagattaaagctaatttaggagaaacgaacagcatgaataaatggccagttttcaagagggttaatgggggaagtcccaggggcggatactatgatcaacatttaatatatcaaatgatctggaaaggggcacacgcgacgtgaaatagggaaaaaattgttgacaatattgttctgcgttagctaaaactaatttaaaaaagaaatctgaaggatctaccctggaacaggcaga

SEQ ID NO: 94558 - DNA, 599 bp, Chicken  19866894473285_1
  misc_feature (1)..(23): n is any nucleotide
nnnnnnnnnnnnnnnnnnnnnnncatggtcacatgttgatgtgtgggagagctgtgggtgctcatgcaactcttgcagggctgtgtcattgggtctgcaagtttcagtgtgtctctaatggctggctcccatgtctgtcagagctcctgctcatcatgcacttggggtgaggatggggaagcaggtccttggccagagtttctggacatgcttgcagccaactctgctggtctaattgctgtggttcagaacagacactggggctacaaaggtggtgaagggtctggagggcaaggtgcrtgagaagcagctgaagtcccatggtgtgctcagcgcagagcagaggagctgaggggaggcctcatggcggctgcagctcctcacaggaagcggaggggcagcgctgagctctgctctgtgtgacaacgacagggcccgagggaacggcatggagctgtgtcaggggaggggcagctgggggttagggacagggtctgccccatagggcagtgggcatggaacaggctgcacagggctgtgggcacggccccaagtgccaaagtttaagaagcatctggacagggctctcagacacatgg

SEQ ID NO: 94559 - DNA, 600 bp, Chicken  19866894473286_1
cccccgttccccccccgtcttgaggtggtacgcgcggggcggggcggggcgcagtggccgcagtgctgccggctccgccgcccgagcgctgcatcgccgtcgctatggcgctgtgcggccgctcggcgctcctccggccgtccccgcgtcccgcagcgcgccgccccagggccgccgaggccttcgtcaggtagcgggcaccacgcagggatgtgatggggaggacgctgggagatggggtcggtggtgtggggaccggagccaggtgggacgcgggaagccaggaaggcaggaatattygctcttttagctctgccgtcctatttctgaacaggggaggggtgccgggctgtgttaggygatggtgttggcttgcctggagttcaggtgtcagctcaggtatcagtaggttactagagcagtgtttctttttaaagacccaaggtgtgtgcgtgtgtgttaagctataatgcattacccgaagtgtttcagtgtcacaaattgcagcccagggcaatgaggacagcacacgtttatagcactctgtgtggaagcacccgctgctgtaatatcaggcgataagctggatgctgcagaggc

SEQ ID NO: 94560 - DNA, 554 bp, Chicken  19866894473286_2
cagtgctgccggctccgccgcccgagcgctgcatcgccgtcgctatggcgctgtgcggccgctcggcgctcctccggccgtccccgcgtcccgcagcgcgccgccccagggccgccgaggccttcgtcaggtagcgggcaccacgcagggatgtgatggggaggacgctgggagatggggtcggtggtgtggggaccggagccaggtgggacgcgggaagccaggaaggcaggaatattygctcttttagctctgccgtcctatttctgaacaggggaggggtgccgggctgtgttaggygatggtgttggcttgcctggagttcaggtgtcagctcaggtatcagtaggttactagagcagtgtttctttttaaagacccaaggtgtgtgcgtgtgtgttaagctataatgcattacccgaagtgtttcagtgtcacaaattgcagcccagggcaatgaggacagcacacgtttatagcactctgtgtggaagcacccgctgctgtaatatcaggcgataagctggatgctgcagaggccagcagacaaacag

SEQ ID NO: 94561 - DNA, 599 bp, Chicken  19866894473290_1
  misc_feature (1)..(17): n is any nucleotide
nnnnnnnnnnnnnnnnnataagtgctttttattttaatgtttcaaaacacactacagatcctagtaattctcactgcccctctgtgatattgatcttgtttatttatttcagagatacttacactgagataaacagagggaaaaaaaaaaacaactgtccaatgctatctccatggcaaacagataggagagcctcagttctcagtgcactgacctcattgctacaaggtaaggttccattctgagctaaatgattttgcgtacctcctatgaggtatctgtgatcccataccatactcyggtgatactattttaggctttgcagccattgaagtttctcagatgagttctgtgggattcctttgtttctacctttagtatggggattgatgaactgttgcacaaagcaatactgagagataccctgaaataaagcaaggagtatgcaatgtcagcatgttttccctgagctttccctgttacactcactaatggaagcttcctaggagcaaattctaagtgaattctggatggaaatgacgtatttttactcttttggttacttaactctagtttttaaaatggtgggtaaatgttat

SEQ ID NO: 94562 - DNA, 477 bp, Chicken  19866894473290_2
tgaaataaagcaaggagtatgcaatgtcagcatgttttccctgagctttccctgttacactcactaatggaagcttcctaggagcaaattctaagtgaattctggatggaaatgacgtatttttactcttttggttacttaactctagtttttaaaatggtgggtaaatgttatttttttaggcttacttcagtaaggcaacttcttagtatttatggatacttagtgtcccctttcacctattttattcactacaaatacatcatcagtagactttccacctggagcggagggagaggragaaaggggatataattcctgaagtccctcgagttgctctcactagtttgggcaattcccaagaaacacttgggactcaaagcctgtcagcagcacggctcatccatcctgcttaagaattctgcttgcagagccagctcactttgtggccaaaatttaagctttccaggacacctg

SEQ ID NO: 94563 - DNA, 600 bp, Chicken  19866894473292_1
gctttaattgctttggactaccaacaatccgcagagtttggcacactcttcctcatatcctccatccagagtctaattggatgggataatgagacagaattattacaacttctttgtttcagttttcatgaaatctaagaacaactctcacaaaaacttttgtggaatatggaagaaaactgaagcagatttgagagcagactggcagctccctgctgcttattgtgaaattgaaagtaccagtgacattcatttgttcttataaagctttgggatgagctcgttattattgcagtgacraaagtgctggttggaaagaagaagggaaatgacaggtttcaacactggctatctaggaagaaaatactgatgtctgcttctacttgcttgctgcccactgtactgagtaagtctcctacactgtgagttttagccatgaagatcttttagactgttgctgtcatgggtctcccagctgatctgcaaaaggtaacaacatgcgtaattttctaaagaatcttcttctgtagggcctgcatcccctctgacctcctgtctctcacagaagtgactgagagttcgtgttaggtaatgagaatg

SEQ ID NO: 94564 - DNA, 600 bp, Chicken  19866894473301_1
aattagttacatggtaatagttatagtacaacagctctgaaaaagaagcactttctatcagtcctttttagagtccatgatggccttgtaagctctgttcatccccaaggacttttagattttcagatgcatacatagtacgaagaaatctaaacatagtctgggggcacattaggctgtaattgctatacaagtgaggtctttacaaccattaccatgaaaatgatctttttcatacaggatttgagaactaatcgtgcctatactacaaagattgaagagtaagtagattttacccamgttaaagagactacagtgatgtatgaaaaataaagactagtatacaacttttattcttttctatttttccagagaagtttaatgctcacagttttktttttttttttttttactgagaaaatctatattatagtttatacagttctatcaccgtacattttaatgtccaaacataaaaataatttaatatgaacatcaatgtcaatttgatatctatgcaaaggtaaacataacgtggcagtgatcgattggttttatgctggcaatttgcataggaatacaatctgaacattataacct

SEQ ID NO: 94565 - DNA, 600 bp, Chicken  19866894473301_2
gttcatccccaaggacttttagattttcagatgcatacatagtacgaagaaatctaaacatagtctgggggcacattaggctgtaattgctatacaagtgaggtctttacaaccattaccatgaaaatgatctttttcatacaggatttgagaactaatcgtgcctatactacaaagattgaagagtaagtagattttacccamgttaaagagactacagtgatgtatgaaaaataaagactagtatacaacttttattcttttctatttttccagagaagtttaatgctcacagttttktttttttttttttttactgagaaaatctatattatagtttatacagttctatcaccgtacattttaatgtccaaacataaaaataatttaatatgaacatcaatgtcaatttgatatctatgcaaaggtaaacataacgtggcagtgatcgattggttttatgctggcaatttgcataggaatacaatctgaacattataacctgagatactgtctccctcttgtttataaaataagcaaaataataattaggaagaaatagtcaaactatttccagttccatactacatatagcaaata

SEQ ID NO: 94566 - DNA, 599 bp, Chicken  19866894473303_1
  misc_feature (1)..(2): n is any nucleotide
nnttatgtttgagcacctgagtttactttgtggagtgagatcaattatttgtctttgctcctgggtttttcttctttgctgctctatcagacagaccattctttcctggaataagagcaaaaggcatctgtgtattttaattcctgcaccaaatcaaagagtatgatttcttctgaaatactatgagttaggctccttaatctctgaggctggaagcttcctcggatgttttcatcgtcttggtggagctgtccattctgcttccaggagtttctacaagtggcttttttcatgtgaacstatctgtctgtctcgtttccctgaccctccaccacagctgcttacgagtggtgcgtagtcaatcaacagcaggaaatagaagaagtgcgtcgagatgaagccctccgactyccagaggacattgactactttgctattgatgcatccctgtcagcagaggtgcgggagaaactgaactccagccgtccccagacggtaagatcctgggccacggtgaggttgaatagcagcataatccctcctgtgtattcccaaggggcatgaaggggtgaggaggtgcaaggaaaggaatacccata

SEQ ID NO: 94567 - DNA, 600 bp, Chicken  19866894473303_2
taagagcaaaaggcatctgtgtattttaattcctgcaccaaatcaaagagtatgatttcttctgaaatactatgagttaggctccttaatctctgaggctggaagcttcctcggatgttttcatcgtcttggtggagctgtccattctgcttccaggagtttctacaagtggcttttttcatgtgaacstatctgtctgtctcgtttccctgaccctccaccacagctgcttacgagtggtgcgtagtcaatcaacagcaggaaatagaagaagtgcgtcgagatgaagccctccgactyccagaggacattgactactttgctattgatgcatccctgtcagcagaggtgcgggagaaactgaactccagccgtccccagacggtaagatcctgggccacggtgaggttgaatagcagcataatccctcctgtgtattcccaaggggcatgaaggggtgaggaggtgcaaggaaaggaatacccataggttttgatatcagttttcactagcttcagagtctgggtttgttttaggctaactcattcctgtttctgtatgcagatcggtgcagtcagccgcatccctggagttacaccg

SEQ ID NO: 94568 - DNA, 599 bp, Chicken  19866894473311_1
  misc_feature (1)..(147): n is any nucleotide
nnnnnnnnnnnnnnnnnnnnnnnnnnnnnnnnnnnnnnnnnnnnnnnnnnnnnnnnnnnnnnnnnnnnnnnnnnnnnnnnnnnnnnnnnnnnnnnnnnnnnnnnnnnnnnnnnnnnnnnnnnnnnnnnnnnnnnnnnnnnnnnnnnnctgtgtgatattaatgctgaaactctgcaggaattggtaaggcttcctgtcactgccacaagctgagggatggatgaatgacatatgagatactccacattcacacaggagaaaacaactgctatttcaagcagtaacacagagggctgcttrctsctttcccaagcctgctcagaaaacaggtaagaccacaaacatgctctwaaagactggttaaagaaaaacccacgagtgttcccaggtcaattgtaaatgctgtgatacactgcaagatctactaaggagaaatgctgctggagatgggcactcaaggtaggctccctcacaaaagcttcccagcacaggagagctgaagaaagaatgggaacagccattacacagtttgaccctaggagatgcatacacaactttgatgcaatggaagggtgaacctcaggtgagctttagttggt

SEQ ID NO: 94569 - DNA, 599 bp, Chicken  19866894473311_2
  misc_feature (1)..(144): n is any nucleotide
nnnnnnnnnnnnnnnnnnnnnnnnnnnnnnnnnnnnnnnnnnnnnnnnnnnnnnnnnnnnnnnnnnnnnnnnnnnnnnnnnnnnnnnnnnnnnnnnnnnnnnnnnnnnnnnnnnnnnnnnnnnnnnnnnnnnnnnnnnnnnnnnctgtgtgatattaatgctgaaactctgcaggaattggtaaggcttcctgtcactgccacaagctgagggatggatgaatgacatatgagatactccacattcacacaggagaaaacaactgctatttcaagcagtaacacagagggctgcttrctsctttcccaagcctgctcagaaaacaggtaagaccacaaacatgctctwaaagactggttaaagaaaaacccacgagtgttcccaggtcaattgtaaatgctgtgatacactgcaagatctactaaggagaaatgctgctggagatgggcactcaaggtaggctccctcacaaaagcttcccagcacaggagagctgaagaaagaatgggaacagccattacacagtttgaccctaggagatgcatacacaactttgatgcaatggaagggtgaacctcaggtgagctttagttggtaca

SEQ ID NO: 94570 - DNA, 599 bp, Chicken  19866894473311_3
  misc_feature (1)..(96): n is any nucleotide
nnnnnnnnnnnnnnnnnnnnnnnnnnnnnnnnnnnnnnnnnnnnnnnnnnnnnnnnnnnnnnnnnnnnnnnnnnnnnnnnnnnnnnnnnnnnnnnnctgtgtgatattaatgctgaaactctgcaggaattggtaaggcttcctgtcactgccacaagctgagggatggatgaatgacatatgagatactccacattcacacaggagaaaacaactgctatttcaagcagtaacacagagggctgcttrctsctttcccaagcctgctcagaaaacaggtaagaccacaaacatgctctwaaagactggttaaagaaaaacccacgagtgttcccaggtcaattgtaaatgctgtgatacactgcaagatctactaaggagaaatgctgctggagatgggcactcaaggtaggctccctcacaaaagcttcccagcacaggagagctgaagaaagaatgggaacagccattacacagtttgaccctaggagatgcatacacaactttgatgcaatggaagggtgaacctcaggtgagctttagttggtacaacagtcctcctattttttgctacaatgcctgtgaatgctgcttgtaag

SEQ ID NO: 94571 - DNA, 600 bp, Chicken  19866894473325_1
caacacatggtctgacttttgggtgctcctacatggagccaggagttggattcagtgatccctatggaccccttccaactctgaatattctatgatattaaattatttttcctgttaattgtcatctctcttgttcatagaaatggtgtttgtatgatcatggcttgaaggagtgtttttattgataataccaggcatagcattcaaattccttccaatgtggtatttcacatgacaatgtgaaaaagctaaaagagtgtagacactaagtaatgcgtgttttcatgcttcctttttttwaaaaaaaaaaaaaataccagattttacaagctaagtttccaataagttagatggtaaatttaacttcagtggagaactgtgataaaaatataggtaatgatgttccagcttatcaagattcagattactaagtgtmaaaagtatctctttctagagccatgagtcctgggataacatatcatgttagcacttgtgacatctgaagctgtgatttccatgctttaaagaataacagtattgatctgacttactacttaaacgacttaaactgctggctctatttccctctaatttgtgcat

SEQ ID NO: 94572 - DNA, 600 bp, Chicken  19866894473325_2
atagaaatggtgtttgtatgatcatggcttgaaggagtgtttttattgataataccaggcatagcattcaaattccttccaatgtggtatttcacatgacaatgtgaaaaagctaaaagagtgtagacactaagtaatgcgtgttttcatgcttcctttttttwaaaaaaaaaaaaaataccagattttacaagctaagtttccaataagttagatggtaaatttaacttcagtggagaactgtgataaaaatataggtaatgatgttccagcttatcaagattcagattactaagtgtmaaaagtatctctttctagagccatgagtcctgggataacatatcatgttagcacttgtgacatctgaagctgtgatttccatgctttaaagaataacagtattgatctgacttactacttaaacgacttaaactgctggctctatttccctctaatttgtgcatatgaacaaaaacagttatattatgaataaatgtatctgaataatatcacttaaaaaatactactgtttttcatgatcagaagaaaaacagtagtagaaagatttttcataaatataaaaaagtctatagctaatag

SEQ ID NO: 94573 - DNA, 600 bp, Chicken  19866894473332_1
gcaaagagctgctttttcaaactggcatgagcatttagagggctggagtcacaattccagtgattgcttcttcagctattgtcttcctcttttatatgcatacaaaagaaggtttaacaatatacacaaaatagtctgatgctgagattgagttcagctgcatttctgttccctccacttgctttcctgagctaaacaaagcagtctttcatgggtttgaattctcccagctcagcaatcgctgtcttttcgtccacagcagccttccagtctcaggtgagcacatgagcaaggttgaaygccagggtaggaggtgttactgagaggccacaacttctaccgcctttcaaacctgcacctgggctttggcagaggcttagctgaataaaggattggaggatgtagccatataaacgaatgtaaacactatataacatctaatcttcattgtagaggaggaagtaaagcagctttatgagtgggaaggtcaaggaatgttatccacttcaactcgggagttctgtggtgtgtatttacattttatccattggctttactattgacactggcttggggtagaggaaactcatgcaaagatca

SEQ ID NO: 94574 - DNA, 599 bp, Chicken  19866894473336_1
  misc_feature (1)..(167): n is any nucleotide
nnnnnnnnnnnnnnnnnnnnnnnnnnnnnnnnnnnnnnnnnnnnnnnnnnnnnnnnnnnnnnnnnnnnnnnnnnnnnnnnnnnnnnnnnnnnnnnnnnnnnnnnnnnnnnnnnnnnnnnnnnnnnnnnnnnnnnnnnnnnnnnnnnnnnnnnnnnnnnnnnnnnnnnagctgcagtgcatgatctgacattctcccatgactgtagagataattccctgaatctgcaactgtgcatcgcaggttaacccactgtaagaactgtgctcaggatggaatatatttgtcatgatatttcaaarttggtccctacggatgtgcaagtcttattatttatttgacataacatagagaattaagacctgtagcaacccataaagctgctgttagaacaaatgaagagctcaggataccaatgaatattttacaatagtttgcagggttataacacaatctgaaatacggtatcagctacattcataccatgtctttcaagtgcagctcttctagagatgccagcatctagtttttatttagcatagcaaattytactcaggtaactacaccaatagaaaaaaaaaagtgttgaattttatgccca

SEQ ID NO: 94575 - DNA, 600 bp, Chicken  19866894473336_2
ccactgtaagaactgtgctcaggatggaatatatttgtcatgatatttcaaarttggtccctacggatgtgcaagtcttattatttatttgacataacatagagaattaagacctgtagcaacccataaagctgctgttagaacaaatgaagagctcaggataccaatgaatattttacaatagtttgcagggttataacacaatctgaaatacggtatcagctacattcataccatgtctttcaagtgcagctcttctagagatgccagcatctagtttttatttagcatagcaaattytactcaggtaactacaccaatagaaaaaaaaaagtgttgaattttatgcccactggttttaccaattccctatttgaatgagcttaaaaaaacctgaaaaattctaagttgaacatcaaatggatatgatcatttacatatatagtaccctcctcagagtcacgtaaatacgtaaatacgtagcagtgcagaaacctttaattacttttcaggtcagatgagcctgtctttaagactttagatgaaatgttgacaaaattcacaagtctgctgcccatcattgctgccgtccattatcat

SEQ ID NO: 94576 - DNA, 600 bp, Chicken  19866894473341_1
ggtggagccttcctggtgccaaaaggggcagaggaggagcaaagcatactgacacaccacaggcagccaagggagaggcagtcattgaaaacaatggattttctgtggttgtatgggtcgtcctttcccatccctcaactctgggcctgcagcgtgagaaggtggcatctcttctgccctgatgccaaaggagagggatgtggaggagagggcctggcgtcctctggacggctgcactgagcctgcagggggtgcactggagggcctgtgaggtccctggggcctggtgctggggttttrcrcccaggggatgggatggctgaagagggattgctgtcatcatcctgttctctccttgattacagaatgggtggttgaaggtgaagcaacctttgtatgtgatagagttaatttgtcttagcaacaaatctgagtggtttttttttaatgaaaacataaaaataggccaacgaaaacatagagctggtgggacatcctaccttatttctgtgacagtaatgcttcagtctggtccgatggcaggggctgcctttacatttgttattaagttttatggggataatgaccagaaattctgcc

SEQ ID NO: 94577 - DNA, 600 bp, Chicken  19866894473341_2
tggagccttcctggtgccaaaaggggcagaggaggagcaaagcatactgacacaccacaggcagccaagggagaggcagtcattgaaaacaatggattttctgtggttgtatgggtcgtcctttcccatccctcaactctgggcctgcagcgtgagaaggtggcatctcttctgccctgatgccaaaggagagggatgtggaggagagggcctggcgtcctctggacggctgcactgagcctgcagggggtgcactggagggcctgtgaggtccctggggcctggtgctggggttttrcrcccaggggatgggatggctgaagagggattgctgtcatcatcctgttctctccttgattacagaatgggtggttgaaggtgaagcaacctttgtatgtgatagagttaatttgtcttagcaacaaatctgagtggtttttttttaatgaaaacataaaaataggccaacgaaaacatagagctggtgggacatcctaccttatttctgtgacagtaatgcttcagtctggtccgatggcaggggctgcctttacatttgttattaagttttatggggataatgaccagaaattctgcctt

SEQ ID NO: 94578 - DNA, 600 bp, Chicken  19866894473350_1
gcgcataggtgtgcttaagtacaggcgtgcggcggcgaggcgggcgtcaggccgagctgtcactgttagcatgagggcagggaggcgccgcgctggaggatgagcgcagcgcgcggtgccgctcacgttctcccgctgcagcctctcagctgcgtgctgcgccaaaggcagcgtgttgtgtgctggagctgttgccgtacggctgtgctgctctcgctgaagcgttgcgtcccgaagtacttcacgtgacgtacctaacaggaggaagcaagctgctgaacgaaccgatgcacgcttctyggcgtcccaggcctcgggctcggggttcctgcgtctcccaccccttgctttgcctcccgttgccaccacagctttgctcccagaaagctgaggcagacggtgcagtttctaaagcaccctcttcatagtgggaggagggctgccgctatttttatctgtctcctcattccagaggagtttgccttctgaagtcagttctggcctgaaagagtcagctcctcagcacctgttagctctgttagggcaggttgtggtagactccaagtgcccacttggagtatgtgaaatagctgaaagatt

SEQ ID NO: 94579 - DNA, 600 bp, Chicken  19866894473351_1
tgaccttgtgagctgactggctaacattttccttgtcagacaaatatgagcttccaaaaagctatttatcagcttgaactcaaataaaagcttttgtgggaaagaacattaaaagcaattttcagctggtaaatagtcagccttcatattaagtcttggcatagaaatgttaataagtagtaaatttaataaatctgtttaatccccggctcacataatattgcttctcagttcaattatttatgtagaacacagagctggaatgagctctggaagctttgaatactggctgcgtgtccygctgcctcgcagaaatggaaataattagcctgctttttggtcagagggtttgcaacaaaactgagtgcaatttcgtctgctttcagatcttgacaccatttcacaaagcacctaaaaactcctcacaaatgtacgtacttgtagctggagttctttgagttctgtctgctatctgctgttaaactgattactgtttgctttgacctgttcacttacagcatattgtgtgtgtgtactttactgtactttcctgcaggttccttaaatacctatttatgttttcacacttcagatcccctt

SEQ ID NO: 94580 - DNA, 600 bp, Chicken  19866894473353_1
ggtgcttgcgtggagctcttcccttcctttttccttccttcaaagcccaacctgtgctgtgagtagctccctgtttccttgggttggtttctgcaggtttgcattgcttctcagagcagaaacagtgggaagtgtgtgaagagccaagggcaaggctggagcagcagggagctgccggtagcatgctgaaaggtaggctctatctgcccacatcagccgtgcaatgcttacacctgtctgactctcagctgctcaagaaaactattttttcttctgctttcctgaagggtcacatccttyaaggttttccttctcttaagtcccctcggcatacttgaacaccccagcccttccyctctaacccaccccttttkggctcctttatccaccttttcttctgtatctctgcatctctcctgttattcctttttcttaaatctctccagggctgtctgcctttggagctgcactggtcagtgtccaagagctgcttgacatgaatcttgtcgtgttattcagccagaacaaggtctcctgaaggctgtaactgcacatatccatgtgctctttcacaccttcctttctgttgcacatcctatt

SEQ ID NO: 94581 - DNA, 589 bp, Chicken  19866894473353_2
gctgtgagtagctccctgtttccttgggttggtttctgcaggtttgcattgcttctcagagcagaaacagtgggaagtgtgtgaagagccaagggcaaggctggagcagcagggagctgccggtagcatgctgaaaggtaggctctatctgcccacatcagccgtgcaatgcttacacctgtctgactctcagctgctcaagaaaactattttttcttctgctttcctgaagggtcacatccttyaaggttttccttctcttaagtcccctcggcatacttgaacaccccagcccttccyctctaacccaccccttttkggctcctttatccaccttttcttctgtatctctgcatctctcctgttattcctttttcttaaatctctccagggctgtctgcctttggagctgcactggtcagtgtccaagagctgcttgacatgaatcttgtcgtgttattcagccagaacaaggtctcctgaaggctgtaactgcacatatccatgtgctctttcacaccttcctttctgttgcacatcctattttatcttctcactttctaggactgcagaaattctttggacagga

SEQ ID NO: 94582 - DNA, 570 bp, Chicken  19866894473353_3
ttccttgggttggtttctgcaggtttgcattgcttctcagagcagaaacagtgggaagtgtgtgaagagccaagggcaaggctggagcagcagggagctgccggtagcatgctgaaaggtaggctctatctgcccacatcagccgtgcaatgcttacacctgtctgactctcagctgctcaagaaaactattttttcttctgctttcctgaagggtcacatccttyaaggttttccttctcttaagtcccctcggcatacttgaacaccccagcccttccyctctaacccaccccttttkggctcctttatccaccttttcttctgtatctctgcatctctcctgttattcctttttcttaaatctctccagggctgtctgcctttggagctgcactggtcagtgtccaagagctgcttgacatgaatcttgtcgtgttattcagccagaacaaggtctcctgaaggctgtaactgcacatatccatgtgctctttcacaccttcctttctgttgcacatcctattttatcttctcactttctaggactgcagaaattctttggacagga

SEQ ID NO: 94583 - DNA, 600 bp, Chicken  19866894473358_1
tttctctaaactccaggacacatatttcagatatttagagcaaagtgtgatgtcttaacaagggttgccataagaactaagacagatattcaagattgtctgcagctttgaatgacagccaccagcatgaaaaatacgtttgaaagttcagcaggaccaccaaccactgagcaagtctgcccatgctattgggaagaaaagccaaataaatacatagttggacgactgtttgcttttaactattctagcattttgtttgtgactatagccaccacgaacagccacaataataaaattatyatttttgtgacaatcagggcattaaagcaattaatagaaatctgctgataaaggaagaggtgtatcatttgagattcagataatgagtattactattttagagaagaaaaaaaaaaaagagttgaagacataccagtactcctatttcattatgctataactgttaaggtgtatgacacctcctgtatgaactggataatatactggcttgtatacaattcttggtcaccaggagatatatctgatgtattaattattgtgtgacagtaaagacctccttctaccatccaaaagtgcact

SEQ ID NO: 94584 - DNA, 510 bp, Chicken  19866894473365_1
agatgttggctacctgtagtggaggagttgaccttccgcgttgtaatcccgataaatgtcgcactctttctcaaacactccggagggcgatgaactgtaacacagtaatggggaacagagggttactgggggtcctcatccacctccccttcactttggggtcagtggagcccatctgcagagaagggtctgggctctgtgcccagggccggatcccattgctggcagtgagcttggagatgttcactggggtgtttggtagaggatgggacgagatgggatgggataaaattggatggratggaatggaatgggataggattaggatgggatgggatgggatgggatgggatgggatgggatgggatgagatacgataggataggataggataggataggataggataggataggataggataggataggacgagataaaattggatggaatggaatgggatgggatgggatgggatgggatgaaatggaatagaataggatacgatag

SEQ ID NO: 94585 - DNA, 600 bp, Chicken  19866894473367_1
ttgtaaatacacagaattaaatgcctcacagttggcatttcagtctgcttgtttaacagtctgccatttcagcatttaatcctatcaaaagaaaggaggaggattaaagcaagggaagctttttcaaaatgtcactttttatgaaaattcatgatcttgtaaaatttgataatatttgtaaatacagtggggaatagttctgagatttgtgccttacataatgttctgtaatccgtctttcaaataaacttgaaggccatcaggattttttttctggctcacccgaaacatttaagttgkttttttttttttactggagccttcagagcatttcttcttctctgtgatttaatgagaccttctgttaaaatgcactgtagtgctttgctttgcagagacttgcatatgaactttaaaacaaaagcaaacaaagtcactttttttgtgggggggcatgtgtattcaggtggtccagaacaaggtgctgctgccatagtcacagtgtgacctaatactgcctgcttataaccaggtgcataccctggttgaaragcagagtgctccacagcttgctgcaggaggcagtgtgaaatgcatcag

SEQ ID NO: 94586 - DNA, 600 bp, Chicken  19866894473367_2
tgtaaatacacagaattaaatgcctcacagttggcatttcagtctgcttgtttaacagtctgccatttcagcatttaatcctatcaaaagaaaggaggaggattaaagcaagggaagctttttcaaaatgtcactttttatgaaaattcatgatcttgtaaaatttgataatatttgtaaatacagtggggaatagttctgagatttgtgccttacataatgttctgtaatccgtctttcaaataaacttgaaggccatcaggattttttttctggctcacccgaaacatttaagttgkktttttttttttactggagccttcagagcatttcttcttctctgtgatttaatgagaccttctgttaaaatgcactgtagtgctttgctttgcagagacttgcatatgaactttaaaacaaaagcaaacaaagtcactttttttgtgggggggcatgtgtattcaggtggtccagaacaaggtgctgctgccatagtcacagtgtgacctaatactgcctgcttataaccaggtgcataccctggttgaaragcagagtgctccacagcttgctgcaggaggcagtgtgaaatgcatcagc

SEQ ID NO: 94587 - DNA, 600 bp, Chicken  19866894473367_3
gaaggccatcaggattttttttctggctcacccgaaacatttaagttgkttttttttttttactggagccttcagagcatttcttcttctctgtgatttaatgagaccttctgttaaaatgcactgtagtgctttgctttgcagagacttgcatatgaactttaaaacaaaagcaaacaaagtcactttttttgtgggggggcatgtgtattcaggtggtccagaacaaggtgctgctgccatagtcacagtgtgacctaatactgcctgcttataaccaggtgcataccctggttgaaragcagagtgctccacagcttgctgcaggaggcagtgtgaaatgcatcagctgcatccaggtctataacgttgcatatgtgcatcttctttctccttatggccatgcttgaaattgtgagctttcctggctttcctcagagcagttggagttctgcagcgggttctgatagcctgctttgagtctttcaggctcatttcaggctcatcaagactttcaggctttcacatttaaaatatcaggaaaaaggattacaaagtaaagcaaagtgctgacctccttccagattattacagaatgta

SEQ ID NO: 94588 - DNA, 599 bp, Chicken  19866894473368_1
  misc_feature (1)..(4): n is any nucleotide
nnnnaattccccgatgcaaacacttctttcttcccctcatcctttatcctcctcttttgtcgttttgtattcatataaagcaattctctagcttaaagatttttaactagaaaaaaaattattttcaaccccaatagtgagtaatattctgacctttagaattcattttcaatgatgaagatcagaataagtggtttattcttgtctgtcttgctcccttgacacaaagtaaacaattgcaatctcccaatttttctttcaacagaaacatagacaacaacatgttcctgacttcacatsccccagtactctcaatatgccaaggccaatttaggttgaggcataaactatctgtactgagagtttaaaggattgaatctatcgctctctacrcagcattgtaggagtagatatttacaataagaactcagtgacttatttatacttgaaccaaagtactgagtcctacttctcatggaagctttgtaagcttaaaataacctggactactgaatgaattatccccraagttctttttaaatatcagatgacaaagtgcagacagtaaagtgaagatgatactctcaaaggaactcctt

SEQ ID NO: 94589 - DNA, 600 bp, Chicken  19866894473368_2
taaagatttttaactagaaaaaaaattattttcaaccccaatagtgagtaatattctgacctttagaattcattttcaatgatgaagatcagaataagtggtttattcttgtctgtcttgctcccttgacacaaagtaaacaattgcaatctcccaatttttctttcaacagaaacatagacaacaacatgttcctgacttcacatsccccagtactctcaatatgccaaggccaatttaggttgaggcataaactatctgtactgagagtttaaaggattgaatctatcgctctctacrcagcattgtaggagtagatatttacaataagaactcagtgacttatttatacttgaaccaaagtactgagtcctacttctcatggaagctttgtaagcttaaaataacctggactactgaatgaattatccccraagttctttttaaatatcagatgacaaagtgcagacagtaaagtgaagatgatactctcaaaggaactccttgacatgacaaagataaagggcaagaccagcgtctctggttaaacagcttaaagatcagagctagctctgattttcattcagaagtcaaccccat

SEQ ID NO: 94590 - DNA, 600 bp, Chicken  19866894473368_3
agtaaacaattgcaatctcccaatttttctttcaacagaaacatagacaacaacatgttcctgacttcacatsccccagtactctcaatatgccaaggccaatttaggttgaggcataaactatctgtactgagagtttaaaggattgaatctatcgctctctacrcagcattgtaggagtagatatttacaataagaactcagtgacttatttatacttgaaccaaagtactgagtcctacttctcatggaagctttgtaagcttaaaataacctggactactgaatgaattatccccraagttctttttaaatatcagatgacaaagtgcagacagtaaagtgaagatgatactctcaaaggaactccttgacatgacaaagataaagggcaagaccagcgtctctggttaaacagcttaaagatcagagctagctctgattttcattcagaagtcaaccccatcacatatgaagtttcaaaaggcttcactgactgtttttggcaagtgtggtatgttcttctgaagcccatcctacagtacacatgtatctatgcaagacagccccctcccaaaactgcagggccatctgccacta

SEQ ID NO: 94591 - DNA, 600 bp, Chicken  19866894473400_1
ggcacttttattgctgcaataaaaacagcaaagtgatcttctgatggcacttaattagattcattttatcttctttgactgagcatgacatactgtaacccttatttatgaagtaaaaatgaatgtcttatggttcctaacacaattgaagaagaaattaccatggtattcagcttaatctgtgtttgtatccgacataaatgatcttaagataaattacaggaaattattttcttctcctggtaaccataacaacagatgagaattggttctagctcaacttactgtttctgaactctyccataatgtctaataaaaattataagacaaaagcaatccacaggctttcatttttgtttatataagaacaatttgtgaagcactgaaaagtaattgtgggtttaagttaagcttcagtctttcagctcttcatcaggaacaggatgaaatgcattgctgttccaaagtgcaatggcttacagatcatgtaaaggatctccctaggaatggacacttgaaaaagattaaggaaaacgaaacctccatgaattgtgggggaagtgagcaaaagagaaattagaagagtttagctgagcagag

SEQ ID NO: 94592 - DNA, 600 bp, Chicken  19866894473406_1
atttatcccccccacctcgcagacagctccatcactgcatttccaaagacctcaggggtaccagtgaccctctgggtgttaagcaccccctggtctaaggcataaatgtacagctgacaatcaaaactgacagaaacgctgactttaaaaataaacgtatccattgcagtttgatagaactttttaaaatcacgtgcttatctctcacgagtgctcaccaccaggataaatcaccgcccattggttcttctgtaaataaacatgaaacatccttgtataaattaaaaagaaaaaaaaatraagaaaaaaaataatttaagaaaatccactgatatatgtccgaagaatgatccctttccagaagatttaaataatttgaagaaaaaggaaaacccaacaatgtgtgagctctgcttcactttttctctggagctgatttaaattcccaataggagaatgaaaactctttaacagtagaaggaactacgagtgttttacctttcaataaacatgggaggggaaaagaaaaatgcatgtaaatatttttaataggaaacatatcttaaacagaactttttttgtatgtacataactcttcta

SEQ ID NO: 94593 - DNA, 599 bp, Chicken  19866894473411_1
  misc_feature (1)..(37): n is any nucleotide
nnnnnnnnnnnnnnnnnnnnnnnnnnnnnnnnnnnnntgccattttgtcatactgcccctctgctgccatctgtcacgcagcaacaacatgtaacaggatatgggtgggaaggttcaaccccctattgctataccaccaccattcacctccaattttgtgagccaacatcataaaatgggtggcattacttttggagtggtaaaatattgtaaaatatacaattcttagttaatatgtaagcaattaacttttacttattagtatttttacaaaaacttaaaaaaagagcacaccaccaycataaaactagtgggatatgtgaccctgyttctttgaaactaatgcatcactacctgttttgatgtcagtggttgcaattcttactgagttctcaaagwgttcattggatatttttgattaaattttactcttcctgtgcttcttccttgaaaacatttgttcacaaatgtacatactgcttcaaagtgatgacatgaataaagcatgactgtgatgtgaggaatgtttttctctggtaagaggcagcttataaaagtaaagagacacagtcagagtttgtgttgtctgtctgattgca

SEQ ID NO: 94594 - DNA, 599 bp, Chicken  19866894473411_2
  misc_feature (1)..(8): n is any nucleotide
nnnnnnnntgccattttgtcatactgcccctctgctgccatctgtcacgcagcaacaacatgtaacaggatatgggtgggaaggttcaaccccctattgctataccaccaccattcacctccaattttgtgagccaacatcataaaatgggtggcattacttttggagtggtaaaatattgtaaaatatacaattcttagttaatatgtaagcaattaacttttacttattagtatttttacaaaaacttaaaaaaagagcacaccaccaycataaaactagtgggatatgtgaccctgyttctttgaaactaatgcatcactacctgttttgatgtcagtggttgcaattcttactgagttctcaaagwgttcattggatatttttgattaaattttactcttcctgtgcttcttccttgaaaacatttgttcacaaatgtacatactgcttcaaagtgatgacatgaataaagcatgactgtgatgtgaggaatgtttttctctggtaagaggcagcttataaaagtaaagagacacagtcagagtttgtgttgtctgtctgattgcaactctatacaatccatttgaaaattcaca

SEQ ID NO: 94595 - DNA, 600 bp, Chicken  19866894473411_3
tatgggtgggaaggttcaaccccctattgctataccaccaccattcacctccaattttgtgagccaacatcataaaatgggtggcattacttttggagtggtaaaatattgtaaaatatacaattcttagttaatatgtaagcaattaacttttacttattagtatttttacaaaaacttaaaaaaagagcacaccaccaycataaaactagtgggatatgtgaccctgyttctttgaaactaatgcatcactacctgttttgatgtcagtggttgcaattcttactgagttctcaaagwgttcattggatatttttgattaaattttactcttcctgtgcttcttccttgaaaacatttgttcacaaatgtacatactgcttcaaagtgatgacatgaataaagcatgactgtgatgtgaggaatgtttttctctggtaagaggcagcttataaaagtaaagagacacagtcagagtttgtgttgtctgtctgattgcaactctatacaatccatttgaaaattcacagttaatgtatttatgttgactgaaaatggaagttgcaaatctaccaataaaatgatcattttctagtgagt

SEQ ID NO: 94596 - DNA, 600 bp, Chicken  19866894473413_1
aggttacagggctggtatgaacccgagtagtctctggtctcccatcagctgtagccaaaggaggcctgggttgcacaacccattggaaagggcaggaacactcagagagggtggggaaagagagagtatggccagtaaaccttattcattttggaaactgaaagcctgaagaggtgctgacagaatagagggacagctgaggagcttaataccagcagcgtggaggcagcagccctcatcctctgggtccaagtggaaaaagactatggccactgagaaaacacacaatgcttctaaatyatgtcatctggtttttgtttcggtatttcttttctctgtctcagccctagctgrccagaccacaaggcagatctgacagcactgccctgatggctccctatgcaactcactgtagagcggtgggactcttcccactgygattcagcaaggtgacagaatccagtgctgggagattttctgcctctctccctctcattatgttagctggaattagctgttagtacattcctatccaactttggcagagtgccctctcctccataacagatcaaaatgaaacgccagacccagcacgcttca

SEQ ID NO: 94597 - DNA, 600 bp, Chicken  19866894473413_2
tctcccatcagctgtagccaaaggaggcctgggttgcacaacccattggaaagggcaggaacactcagagagggtggggaaagagagagtatggccagtaaaccttattcattttggaaactgaaagcctgaagaggtgctgacagaatagagggacagctgaggagcttaataccagcagcgtggaggcagcagccctcatcctctgggtccaagtggaaaaagactatggccactgagaaaacacacaatgcttctaaatyatgtcatctggtttttgtttcggtatttcttttctcygtctcagccctagctgrccagaccacaaggcagatctgacagcactgccctgatggctccctatgcaactcactgtagagcggtgggactcttcccactgygattcagcaaggtgacagaatccagtgctgggagattttctgcctctctccctctcattatgttagctggaattagctgttagtacattcctatccaactttggcagagtgccctctcctccataacagatcaaaatgaaacgccagacccagcacgcttcagttgtctgggaagtccttgtgcagaaggtggatgtgc

SEQ ID NO: 94598 - DNA, 600 bp, Chicken  19866894473413_3
ctcccatcagctgtagccaaaggaggcctgggttgcacaacccattggaaagggcaggaacactcagagagggtggggaaagagagagtatggccagtaaaccttattcattttggaaactgaaagcctgaagaggtgctgacagaatagagggacagctgaggagcttaataccagcagcgtggaggcagcagccctcatcctctgggtccaagtggaaaaagactatggccactgagaaaacacacaatgcttctaaatyatgtcatctggtttttgtttcggtatttcttttctctytctcagccctagctgrccagaccacaaggcagatctgacagcactgccctgatggctccctatgcaactcactgtagagcggtgggactcttcccactgygattcagcaaggtgacagaatccagtgctgggagattttctgcctctctccctctcattatgttagctggaattagctgttagtacattcctatccaactttggcagagtgccctctcctccataacagatcaaaatgaaacgccagacccagcacgcttcagttgtctgggaagtccttgtgcagaaggtggatgtgcc

SEQ ID NO: 94599 - DNA, 600 bp, Chicken  19866894473413_4
ccaaaggaggcctgggttgcacaacccattggaaagggcaggaacactcagagagggtggggaaagagagagtatggccagtaaaccttattcattttggaaactgaaagcctgaagaggtgctgacagaatagagggacagctgaggagcttaataccagcagcgtggaggcagcagccctcatcctctgggtccaagtggaaaaagactatggccactgagaaaacacacaatgcttctaaatyatgtcatctggtttttgtttcggtatttcttttctctgtctcagccctagctgrccagaccacaaggcagatctgacagcactgccctgatggctccctatgcaactcactgtagagcggtgggactcttcccactgygattcagcaaggtgacagaatccagtgctgggagattttctgcctctctccctctcattatgttagctggaattagctgttagtacattcctatccaactttggcagagtgccctctcctccataacagatcaaaatgaaacgccagacccagcacgcttcagttgtctgggaagtccttgtgcagaaggtggatgtgccttacgtgttgyagcat

SEQ ID NO: 94600 - DNA, 600 bp, Chicken  19866894473413_5
accttattcattttggaaactgaaagcctgaagaggtgctgacagaatagagggacagctgaggagcttaataccagcagcgtggaggcagcagccctcatcctctgggtccaagtggaaaaagactatggccactgagaaaacacacaatgcttctaaatyatgtcatctggtttttgtttcggtatttcttttctctgtctcagccctagctgrccagaccacaaggcagatctgacagcactgccctgatggctccctatgcaactcactgtagagcggtgggactcttcccactgygattcagcaaggtgacagaatccagtgctgggagattttctgcctctctccctctcattatgttagctggaattagctgttagtacattcctatccaactttggcagagtgccctctcctccataacagatcaaaatgaaacgccagacccagcacgcttcagttgtctgggaagtccttgtgcagaaggtggatgtgccttacgtgttgyagcatcttctcgccatggcttactaycctacggagatctttaattcatgatgccctaaaaacaactgtaggaagttggctgtgctgtta

SEQ ID NO: 94601 - DNA, 600 bp, Chicken  19866894473413_6
gctgrccagaccacaaggcagatctgacagcactgccctgatggctccctatgcaactcactgtagagcggtgggactcttcccactgygattcagcaaggtgacagaatccagtgctgggagattttctgcctctctccctctcattatgttagctggaattagctgttagtacattcctatccaactttggcagagtgccctctcctccataacagatcaaaatgaaacgccagacccagcacgcttcagttgtctgggaagtccttgtgcagaaggtggatgtgccttacgtgttgyagcatcttctcgccatggcttactaycctacggagatctttaattcatgatgccctaaaaacaactgtaggaagttggctgtgctgttaagtgaaggagaagcagaggcatggtgaaattgtgctgcatattcaccctctcagacaggcatggagcattaacaccacttttmaatttttcatgtatgttcttttataaggtatttccttaactgtgttaagcacagtagccgggggaacatttcatccttgagcagatgtccaaaatgagttaagtcaggttttataacgaagaatctat

SEQ ID NO: 94602 - DNA, 600 bp, Chicken  19866894473413_7
acagcactgccctgatggctccctatgcaactcactgtagagcggtgggactcttcccactgygattcagcaaggtgacagaatccagtgctgggagattttctgcctctctccctctcattatgttagctggaattagctgttagtacattcctatccaactttggcagagtgccctctcctccataacagatcaaaatgaaacgccagacccagcacgcttcagttgtctgggaagtccttgtgcagaaggtggatgtgccttacgtgttgyagcatcttctcgccatggcttactaycctacggagatctttaattcatgatgccctaaaaacaactgtaggaagttggctgtgctgttaagtgaaggagaagcagaggcatggtgaaattgtgctgcatattcaccctctcagacaggcatggagcattaacaccacttttmaatttttcatgtatgttcttttataaggtatttccttaactgtgttaagcacagtagccgggggaacatttcatccttgagcagatgtccaaaatgagttaagtcaggttttataacgaagaatctatatgctcccagatcccaagaacgacca

SEQ ID NO: 94603 - DNA, 600 bp, Chicken  19866894473413_8
tacattcctatccaactttggcagagtgccctctcctccataacagatcaaaatgaaacgccagacccagcacgcttcagttgtctgggaagtccttgtgcagaaggtggatgtgccttacgtgttgyagcatcttctcgccatggcttactaycctacggagatctttaattcatgatgccctaaaaacaactgtaggaagttggctgtgctgttaagtgaaggagaagcagaggcatggtgaaattgtgctgcatattcaccctctcagacaggcatggagcattaacaccacttttmaatttttcatgtatgttcttttataaggtatttccttaactgtgttaagcacagtagccgggggaacatttcatccttgagcagatgtccaaaatgagttaagtcaggttttataacgaagaatctatatgctcccagatcccaagaacgaccaattcacccccaaaccggttttgctttcctctgtgcttcagtgccacctcaaaggatggctttattgcctcctgtgctctcagtggagcagtctgtctgtttaatcagggctggaatggcatgatttgctccaggtttgtgcccgaa

SEQ ID NO: 94604 - DNA, 599 bp, Chicken  19866894473414_1
  misc_feature (1)..(56): n is any nucleotide
nnnnnnnnnnnnnnnnnnnnnnnnnnnnnnnnnnnnnnnnnnnnnnnnnnnnnnnnaattgattgaggggatctcccacagattctctttgtgttacagtgcttagagtttcatagtaggtgaggtgcaattaaaggaattttcaatttaatacttcaaagtttgaggtctgcatggtagataatcagtcacttagcatggatttttattacgtgccctgtgcagctgaacagcttttgatgaaggctaatttaaattctctggaacgcagcaatacaatattgatttgatgtatatccyatttgatttgaaaatggagagcaacgtttgtctctatggtctttttcctggattcctgtggtcaatgtgcggtatgttccgcccatgaagtaatcattaaaatcagccaagttaagcgggcagaacaggcactgggtatacagcactgctccycaagggtctcccagctttgggcagagagctcygttctgccatttgagtaaagatattatcagaggggaaaaaatcctgttcttggttaaacttgtgtaaactcatcaacatcactcaggctaaaggggatttaactgcatggggga

SEQ ID NO: 94605 - DNA, 600 bp, Chicken  19866894473414_2
cttcaaagtttgaggtctgcatggtagataatcagtcacttagcatggatttttattacgtgccctgtgcagctgaacagcttttgatgaaggctaatttaaattctctggaacgcagcaatacaatattgatttgatgtatatccyatttgatttgaaaatggagagcaacgtttgtctctatggtctttttcctggattcctgtggtcaatgtgcggtatgttccgcccatgaagtaatcattaaaatcagccaagttaagcgggcagaacaggcactgggtatacagcactgctccycaagggtctcccagctttgggcagagagctcygttctgccatttgagtaaagatattatcagaggggaaaaaatcctgttcttggttaaacttgtgtaaactcatcaacatcactcaggctaaaggggatttaactgcatgggggatataactacagaccttggtaataaatggaaaattctatggaatgtaatacgttttgagcttgagaataactgttcagtccttacaagcattagatagacctttttccttcatcagtccactttccctccttctttagattgattatgccctgtc

SEQ ID NO: 94606 - DNA, 569 bp, Chicken  19866894473414_3
cagtcacttagcatggatttttattacgtgccctgtgcagctgaacagcttttgatgaaggctaatttaaattctctggaacgcagcaatacaatattgatttgatgtatatccyatttgatttgaaaatggagagcaacgtttgtctctatggtctttttcctggattcctgtggtcaatgtgcggtatgttccgcccatgaagtaatcattaaaatcagccaagttaagcgggcagaacaggcactgggtatacagcactgctccycaagggtctcccagctttgggcagagagctcygttctgccatttgagtaaagatattatcagaggggaaaaaatcctgttcttggttaaacttgtgtaaactcatcaacatcactcaggctaaaggggatttaactgcatgggggatataactacagaccttggtaataaatggaaaattctatggaatgtaatacgttttgagcttgagaataactgttcagtccttacaagcattagatagacctttttccttcatcagtccactttccctccttctttagattgattatgccctgtcc

SEQ ID NO: 94607 - DNA, 600 bp, Chicken  19866894473418_1
actcttccaaccctcctctgtcagctctgtctgactgtgacagggcagggggtccaccacttctgtgtgtgtattgccctggcacccttccctctgacacaccagtgagacatatatatgtataggtcataagtatttccctttcctttgatctctcataggaaatagctttatttcagcccacgagttgtacagccaaattctcttccccatcccactgggaagggggcagtgcacaaagcactgtgtggggctgagccaccgctcgggttaaaacaccagagtcattttggtgcccartgtggggctcctagagttgagataacagcagtgagcaaacgaccgtgtggtgctgagccaccttccatgtcaaagcacagcactgccctgagtccataacagatcaccttgggactctgaaactgtcccygtcactcagtgaagaacaacggaagatcttgaggtcttctcagggagcagctcctgaggtacattccttacaccattcctttggaagaggcctccagttctctggtcctgctctgaagagcccctcttgttatggygctgcagcaaggagaccagctctgacacagcgct

SEQ ID NO: 94608 - DNA, 600 bp, Chicken  19866894473418_2
aagtatttccctttcctttgatctctcataggaaatagctttatttcagcccacgagttgtacagccaaattctcttccccatcccactgggaagggggcagtgcacaaagcactgtgtggggctgagccaccgctcgggttaaaacaccagagtcattttggtgcccartgtggggctcctagagttgagataacagcagtgagcaaacgaccgtgtggtgctgagccaccttccatgtcaaagcacagcactgccctgagtccataacagatcaccttgggactctgaaactgtcccygtcactcagtgaagaacaacggaagatcttgaggtcttctcagggagcagctcctgaggtacattccttacaccattcctttggaagaggcctccagttctctggtcctgctctgaagagcccctcttgttatggygctgcagcaaggagaccagctctgacacagcgcttcatattgccgcctactgactgcagccccggagtgctgctgtagagacaacagggctgtggtgagacacacaagaccttcaggtctgcacaaatgcaaggacttgagagcagcgtaaagagagcaggaat

SEQ ID NO: 94609 - DNA, 600 bp, Chicken  19866894473418_3
cgggttaaaacaccagagtcattttggtgcccartgtggggctcctagagttgagataacagcagtgagcaaacgaccgtgtggtgctgagccaccttccatgtcaaagcacagcactgccctgagtccataacagatcaccttgggactctgaaactgtcccygtcactcagtgaagaacaacggaagatcttgaggtcttctcagggagcagctcctgaggtacattccttacaccattcctttggaagaggcctccagttctctggtcctgctctgaagagcccctcttgttatggygctgcagcaaggagaccagctctgacacagcgcttcatattgccgcctactgactgcagccccggagtgctgctgtagagacaacagggctgtggtgagacacacaagaccttcaggtctgcacaaatgcaaggacttgagagcagcgtaaagagagcaggaatgaaaagagcgtgttgtgctgctgtgcatggctgtacctcccccagatccagatccaggcaaggcaggaagagagaagagcaaaggaaaaagaagtttttgcaagcttttttagtgtcttttaacctattcagggaa

SEQ ID NO: 94610 - DNA, 576 bp, Chicken  19866894473419_1
cttcagttacaagatcagctaaatgcctatctctgtatcttctttaatcttctttatctctatgtattctctatgctcttcttgagatgtagagataatatgccaggcagtgcttaagatatgggccagtcagagttttctgtaggagatagaggacaccttgtctaactatcagtacacttgctgataatactgaatatgctgtgggagggaatggctcatttgctgacagtaagttgatttcagagaaataacaataatgaatctagaactgaaattttaagttccaagttcagcatygtgcaactatcttttttttctcccctatatgaatgttaatctacactaaatctcacttcttcagttatgagggtaacacccttttgagaaggyattctagtgttcctcatttgtctacagaatagaccttaatatcatccctggtctttcaaatttcactgcttactcctcattccattgaggatgaagggggtggacaaaaactgatcccatcacttattctagaggaactcacttttatcttccttgtccaagcaggtagctaaacattactct

SEQ ID NO: 94611 - DNA, 483 bp, Chicken  19866894473419_2
gataatatgccaggcagtgcttaagatatgggccagtcagagttttctgtaggagatagaggacaccttgtctaactatcagtacacttgctgataatactgaatatgctgtgggagggaatggctcatttgctgacagtaagttgatttcagagaaataacaataatgaatctagaactgaaattttaagttccaagttcagcatygtgcaactatcttttttttctcccctatatgaatgttaatctacactaaatctcacttcttcagttatgagggtaacacccttttgagaaggyattctagtgttcctcatttgtctacagaatagaccttaatatcatccctggtctttcaaatttcactgcttactcctcattccattgaggatgaagggggtggacaaaaactgatcccatcacttattctagaggaactcacttttatcttccttgtccaagcaggtagctaaacattactct

SEQ ID NO: 94612 - DNA, 600 bp, Chicken  19866894473421_1
tgtcacggcacaagaggggacatgctgcagtacataaaattcccctggcactgtccaactagcatgcttccctcctaacacagctcactaagaaaataactcaggttccttgggccatgacatcttgagtggtattgccagaaaaagaaaaagaaaagagatgtcagtttctgtcaaaagccattagcataatttatgaaagaaacacttgtgctctagattgtggtttgacacctttaaaacatttcatacctctgtcccaaggttatctatctttaaactcaatagaagtttgtatcygaattcaattccaaaaatagctcctcaagcttgccagagtggtttgttatttcaagcaaaactacagaggtagaaatcaaaatgaagagaaatacagcaattttggctgtgtttcttcttctggagtgggggttaactaatggattttatccaakaaatcattgttaatttgattcccatcattcccttttattgttttcattctctaatctcagctttttcagaccatcctaattacattattttttagacaatatttcttattaggaatcctcttccttcttctagtgtttcataaaa

SEQ ID NO: 94613 - DNA, 600 bp, Chicken  19866894473421_2
aagagatgtcagtttctgtcaaaagccattagcataatttatgaaagaaacacttgtgctctagattgtggtttgacacctttaaaacatttcatacctctgtcccaaggttatctatctttaaactcaatagaagtttgtatcygaattcaattccaaaaatagctcctcaagcttgccagagtggtttgttatttcaagcaaaactacagaggtagaaatcaaaatgaagagaaatacagcaattttggctgtgtttcttcttctggagtgggggttaactaatggattttatccaakaaatcattgttaatttgattcccatcattcccttttattgttttcattctctaatctcagctttttcagaccatcctaattacattattttttagacaatatttcttattaggaatcctcttccttcttctagtgtttcataaaagtagctggcattaattatttggccccaacactgtattactgaatcacagaatcacagaactataggtgttggaagggacctctggagatcattaagtccaacctcctgctaaagcaggttccctgcagtaggttgcacaggaactggccattaac

SEQ ID NO: 94614 - DNA, 600 bp, Chicken  19866894473426_1
tctttacagtggggaacaatgacaacacactgcagtacttaatggttgaaaagaacagtaagacagataaggaagaacagccgaatttctagggggaaaatatatatatatatatatatatataatatatatatattgttcactagacaaattcagagtggaagctgtttccttaactgtatttatgactccagagacatttcttgtaccagtacagtgccctcatttctctattggtctatctttcatcccacttggagcttatgcacggtgacgaaggattctggatcagaagttgtrtggagaggtgagctcagctcccgctgtgccagcatagcgtgagatcagtgaggagagaggctttggaaggtcacctgcccaaaataaaattcagagcatctgttaactaagatttttcatttatttatagcctaactacttatgctgagattttcaacatgacagcagcaagagatgtaacactcacacactgccaaatttgaaactcttgcttccagaagttggtcactataatatgtggttcaatggggacaaaacttacttttgccattatcttttttcttgaaagcaactgaactt

SEQ ID NO: 94615 - DNA, 600 bp, Chicken  19866894473427_1
tgctcatgactgtttactggactgtttactggcggaagatctgtcctgtgaccaaatgactcctgtttgctatggcagactgggggatgataccatcgtatcttgtgaagacaggatactagttggcgtctctatactccctcttatctgctggcaaggccagggagctgggaacaaaaggaattcctgctgagatacaaaagccaaaagctgtcattccaaaaggctgactcaaccactttggactcataaataagtttgtgctgccctcgcagtgattgtcatcgttcaccatcgtcrtcacagtggtcaccgtcctcatcaacagaacaacgcccaacgggccacctctactgaagagcaacaactgaaccacgaatcatgctggacccatggtggtgactatctccctgtctccctcttgcttcctatagagactccttactcgtatttcctatattttctgctgcccttcttcccttccccatcaccctaatttgtacctataaagactccttgattctattttctatcttttcgattgcctttcttcccttccccattaccccaatccataatagtgtctgtcctcccctttcc

SEQ ID NO: 94616 - DNA, 600 bp, Chicken  19866894473439_1
tagcaactctttatttgctttgtttgctcagctaatattgactttccagcctaacactgctgctattgagtttggctattcacagtactgtttgactagcattagaacagcgcggcgataacagcatgtgcaaccgaaaaagcaatccatcgcccctccgtgggacagtgccattatgacagagggggaaaaaaaaccgtctgcttattcagtcaagtacaactgttgaatgcaacgctggcaatgacactcctggctagtgcaaacaacccaaggttacagcgttagtgtgtactcgcrcaaagcaaacactacagagcggttccgttgctgcccgtcgccttgggcaggacccaggggtttgttccctgcctggggtcagtgtgtgctgccctgtgccaaggctcctcccagccgtgtgcgtgctgtggagtggatgggcagacacggatggatggatgggacccctctgtggggggaagcagggcgagagcgctgcggaagggacgaggtggttgtagagaggtgggtatcggtctcttctcccaggtcacagccacaggacaagaggtgacggcctcatcctgcgcgaggggtggc

SEQ ID NO: 94617 - DNA, 574 bp, Chicken  19866894473441_1
aaatggccatcgctcactttctccatgcagatatctcctctagtgatgggttgctttgggacacctttcagccaaaccccatgatgttgaaaagaagcaatttaggggctgagtacatggaggagccacttgatgatgcttcccagcatggatgagctcttcctggcccctgggctccggaaggcacaaggagcacttggcacattggcccttcagcacgcgcttcccttccactcaaagcaaacgagcccttaacattttggcaagtggctgatctgggggggccctgtggggtgccartacaccgctgcccgcctcgtgkckcccagccctgccaggagggtgctggggcagcagccaagagatgtgctctgtcactcagtcacaaaaccccaaccctggtcccaaaatcccagctcaccccaaactatgcattagcaccaggtttgcatctgcatcctcatgcgccaggtaaggaggggtcggcaggtttggggaaggatcacacgtggcagcttttaatagcaacccgcctgcttgtcactggcttctcatcactcctcttgaagcggtt

SEQ ID NO: 94618 - DNA, 552 bp, Chicken  19866894473441_2
ccatgcagatatctcctctagtgatgggttgctttgggacacctttcagccaaaccccatgatgttgaaaagaagcaatttaggggctgagtacatggaggagccacttgatgatgcttcccagcatggatgagctcttcctggcccctgggctccggaaggcacaaggagcacttggcacattggcccttcagcacgcgcttcccttccactcaaagcaaacgagcccttaacattttggcaagtggctgatctgggggggccctgtggggtgccartacaccgctgcccgcctcgtgkckcccagccctgccaggagggtgctggggcagcagccaagagatgtgctctgtcactcagtcacaaaaccccaaccctggtcccaaaatcccagctcaccccaaactatgcattagcaccaggtttgcatctgcatcctcatgcgccaggtaaggaggggtcggcaggtttggggaaggatcacacgtggcagcttttaatagcaacccgcctgcttgtcactggcttctcatcactcctcttgaagcggtt

SEQ ID NO: 94619 - DNA, 550 bp, Chicken  19866894473441_3
atgcagatatctcctctagtgatgggttgctttgggacacctttcagccaaaccccatgatgttgaaaagaagcaatttaggggctgagtacatggaggagccacttgatgatgcttcccagcatggatgagctcttcctggcccctgggctccggaaggcacaaggagcacttggcacattggcccttcagcacgcgcttcccttccactcaaagcaaacgagcccttaacattttggcaagtggctgatctgggggggccctgtggggtgccartacaccgctgcccgcctcgtgkckcccagccctgccaggagggtgctggggcagcagccaagagatgtgctctgtcactcagtcacaaaaccccaaccctggtcccaaaatcccagctcaccccaaactatgcattagcaccaggtttgcatctgcatcctcatgcgccaggtaaggaggggtcggcaggtttggggaaggatcacacgtggcagcttttaatagcaacccgcctgcttgtcactggcttctcatcactcctcttgaagcggtt

SEQ ID NO: 94620 - DNA, 600 bp, Chicken  19866894473447_1
tggtggtgtttgggagtggatgggagaggatttggaggctttaaggagtgataagagatttgaggggataaagaaggactttggggtaagagatgagcatttagggatttggtgtgtctgggaagcatttgggatgcaccagtgagaatgtgggattgttagatttggggaggttatctggtttgtggttagaacacgacatcagggagtcccaaacagggaatttgaggtctgtccccttccacacaccccagaaatgagacacttggggaggcccatcagcgcggtaaatcagtgctsactgtggtgtagatgacaggggactggggggcagtgggggaagtgggagattgggagcacgggatggcagctggcatctcggcgtaggtcagatcctcgctgtccctggagggcccctggagataggagaggagaatggggtgctaccatgggggtccccaagatgagtgagctgagggtgggtctgtggtgtaggtatgtggggggtgtggccatgaggaggagtctgcatttgtgactgggcttagatttgtggtctgcatggcgaatgtttgggggtccagccgtggatttggggtg

SEQ ID NO: 94621 - DNA, 600 bp, Chicken  19866894563694_1
tgtgcaaagaagaccttctcaacatggtaactgaatcacttaacgttcatgttagatgaccatagatttttcaacaacaggctttcagcagtgccagtaatgagaaaagtttccagcagtaaattttctgtgtctgtttgatttgtaacatggagggcagtgcttgtggaagtgagccaatgcaatgctgctgctgttgcatcctaaacagtttcgaaaattaagtttactgttagagcaggtgttacctaaccttcgcttggccagctcagatttattgcagtcctttctgtcaatacrgaaygttacctgaaataatggaatagcatatatttacatttagccaaggcagttgtttgtgattctggcgtgaagatggtgagtcctttggagtgtgacctctgccaagtgggaatgtgggactgcagagccgtggcagtggtgcagatgaatgctcatctcagctgctgtgatgacgttggggaggaccaggtgtccttgtactggtatgactggttaaggaggtaggagcatagcatgggaaaaatatctctttgatttgttttctaaaccagttaagtgttagatacctattaagcc

SEQ ID NO: 94622 - DNA, 600 bp, Chicken  19866894563694_2
caaagaagaccttctcaacatggtaactgaatcacttaacgttcatgttagatgaccatagatttttcaacaacaggctttcagcagtgccagtaatgagaaaagtttccagcagtaaattttctgtgtctgtttgatttgtaacatggagggcagtgcttgtggaagtgagccaatgcaatgctgctgctgttgcatcctaaacagtttcgaaaattaagtttactgttagagcaggtgttacctaaccttcgcttggccagctcagatttattgcagtcctttctgtcaatacrgaaygttacctgaaataatggaatagcatatatttacatttagccaaggcagttgtttgtgattctggcgtgaagatggtgagtcctttggagtgtgacctctgccaagtgggaatgtgggactgcagagccgtggcagtggtgcagatgaatgctcatctcagctgctgtgatgacgttggggaggaccaggtgtccttgtactggtatgactggttaaggaggtaggagcatagcatgggaaaaatatctctttgatttgttttctaaaccagttaagtgttagatacctattaagccatca

SEQ ID NO: 94623 - DNA, 600 bp, Chicken  19866894563694_3
aagatggtgagtcctttggagtgtgacctctgccaagtgggaatgtgggactgcagagccgtggcagtggtgcagatgaatgctcatctcagctgctgtgatgacgttggggaggaccaggtgtccttgtactggtatgactggttaaggaggtaggagcatagcatgggaaaaatatctctttgatttgttttctaaaccagttaagtgttagatacctattaagccatcaaaattgttgttgccatttgattttgagaagcgttgtatcacacaggagataggtttgtgctgtgatckgaagttcaccacacttacattaagatayggaactttaggaaaacttccagtggtgctggggagaacaaactgcattttttttctcctaactgtgtattttaggggagagaggctgggaggagtttgatattgcatgtacaggaaaccaaccagygcggtgggtgaatgttttgatctcagcccctgttttctgtgcagactgatgttttgggtgttaccagagcaagtttcatgaagaccacactgtaatctagcctgaaggtggtgtggtcttggatagcacttgagatttgtctcagc

SEQ ID NO: 94624 - DNA, 600 bp, Chicken  19866894563694_4
tctgccaagtgggaatgtgggactgcagagccgtggcagtggtgcagatgaatgctcatctcagctgctgtgatgacgttggggaggaccaggtgtccttgtactggtatgactggttaaggaggtaggagcatagcatgggaaaaatatctctttgatttgttttctaaaccagttaagtgttagatacctattaagccatcaaaattgttgttgccatttgattttgagaagcgttgtatcacacaggagataggtttgtgctgtgatckgaagttcaccacacttacattaagatayggaactttaggaaaacttccagtggtgctggggagaacaaactgcattttttttctcctaactgtgtattttaggggagagaggctgggaggagtttgatattgcatgtacaggaaaccaaccagygcggtgggtgaatgttttgatctcagcccctgttttctgtgcagactgatgttttgggtgttaccagagcaagtttcatgaagaccacactgtaatctagcctgaaggtggtgtggtcttggatagcacttgagatttgtctcagcaattcattttgaatgttatattgtcaga

SEQ ID NO: 94625 - DNA, 600 bp, Chicken  19866894563694_5
aggagcatagcatgggaaaaatatctctttgatttgttttctaaaccagttaagtgttagatacctattaagccatcaaaattgttgttgccatttgattttgagaagcgttgtatcacacaggagataggtttgtgctgtgatckgaagttcaccacacttacattaagatayggaactttaggaaaacttccagtggtgctggggagaacaaactgcattttttttctcctaactgtgtattttaggggagagaggctgggaggagtttgatattgcatgtacaggaaaccaaccagygcggtgggtgaatgttttgatctcagcccctgttttctgtgcagactgatgttttgggtgttaccagagcaagtttcatgaagaccacactgtaatctagcctgaaggtggtgtggtcttggatagcacttgagatttgtctcagcaattcattttgaatgttatattgtcagagttgaaagtacacagaaagcagcagcagcaaacagcaagatctgagtgctggtcattgttgggcaagtactgctgggtcaacacaaaagcaattgaactggaattcgcctcgtctaacctttttgt

SEQ ID NO: 94626 - DNA, 600 bp, Chicken  19866894563695_1
gctctggtggtgaaggacagctggactccagcaagttgtatgggcaaagtgcagagggctccttgcagtgctctaagcagctcactgtcatgaagcagcctcctagagcaccccaaaaatagcgttagtccatcttgcttcacattcacctttttggactgagcccaccaggaacaaagtttttgacttgtgcacgccatttttgagcagtgtattactctgctttggagggtgttagcctgagcatccttctgctgctcgtgaagcttccaagctctgataggtcttggcttcttttcytttttttttttcttctttggcaagcagtttytatgcagttgcaatcctactcttccatcacgtttcaagacaatgcctgcttcctttctaaagaagctattagcttgcatgctctgaaccaaaatgttagctcagctgtaacagatggatggatatgggtatcatgtggcaagttaatgaataatatctatcacctaatttcccgaaagttggcatgtaatgaggctggtgccatgattattgcctctgtaaatcatgactttaagatgatgacaatcccgcctgccccaaggatacggg

SEQ ID NO: 94627 - DNA, 600 bp, Chicken  19866894563695_2
ctctggtggtgaaggacagctggactccagcaagttgtatgggcaaagtgcagagggctccttgcagtgctctaagcagctcactgtcatgaagcagcctcctagagcaccccaaaaatagcgttagtccatcttgcttcacattcacctttttggactgagcccaccaggaacaaagtttttgacttgtgcacgccatttttgagcagtgtattactctgctttggagggtgttagcctgagcatccttctgctgctcgtgaagcttccaagctctgataggtcttggcttcttttctyttttttttttcttctttggcaagcagtttytatgcagttgcaatcctactcttccatcacgtttcaagacaatgcctgcttcctttctaaagaagctattagcttgcatgctctgaaccaaaatgttagctcagctgtaacagatggatggatatgggtatcatgtggcaagttaatgaataatatctatcacctaatttcccgaaagttggcatgtaatgaggctggtgccatgattattgcctctgtaaatcatgactttaagatgatgacaatcccgcctgccccaaggatacggga

SEQ ID NO: 94628 - DNA, 600 bp, Chicken  19866894563695_3
caagttgtatgggcaaagtgcagagggctccttgcagtgctctaagcagctcactgtcatgaagcagcctcctagagcaccccaaaaatagcgttagtccatcttgcttcacattcacctttttggactgagcccaccaggaacaaagtttttgacttgtgcacgccatttttgagcagtgtattactctgctttggagggtgttagcctgagcatccttctgctgctcgtgaagcttccaagctctgataggtcttggcttcttttcttttttttttttcttctttggcaagcagtttytatgcagttgcaatcctactcttccatcacgtttcaagacaatgcctgcttcctttctaaagaagctattagcttgcatgctctgaaccaaaatgttagctcagctgtaacagatggatggatatgggtatcatgtggcaagttaatgaataatatctatcacctaatttcccgaaagttggcatgtaatgaggctggtgccatgattattgcctctgtaaatcatgactttaagatgatgacaatcccgcctgccccaaggatacgggacagccagacaatgatgtacatttaattgct

SEQ ID NO: 94629 - DNA, 600 bp, Chicken  19866894563711_1
gataagtgctgggtcttgtacttgagtcataacctcatgcttatcacctcataggcctagggaagggcagctgataaactgtctccctgagaaagacacgagggtgttggttgacagctgaacatgaactggccatgtggccaagaaaacaagtggccacctgactggcaccagaaatggtgtgaacaacagggaaagagaggtgattgtacttctgttttcagtactggggagtctgcatcttgagtactttggtaagttttgagcctcctgcttcaaggagaatatggagttgcttgrgtgtgtgyggagaagagcaatgaagttgctgaaggaccagaaaagagttatgaggaggaagtgaccaaactgggatgtggagctggtgatgtgtcaggttgatggttggacttgatcttgaagatgtttcccaaccttggtgattctttgtttctgatttatatgaaataggtattggaagactctggcaatggttctatttgtccacatttcaacattctactatggggttttcagcatgtcaatgataawgaatgacttttcaaatgaagcatattgactgacagaaagacaacaaat

SEQ ID NO: 94630 - DNA, 600 bp, Chicken  19866894563711_2
ctgggtcttgtacttgagtcataacctcatgcttatcacctcataggcctagggaagggcagctgataaactgtctccctgagaaagacacgagggtgttggttgacagctgaacatgaactggccatgtggccaagaaaacaagtggccacctgactggcaccagaaatggtgtgaacaacagggaaagagaggtgattgtacttctgttttcagtactggggagtctgcatcttgagtactttggtaagttttgagcctcctgcttcaaggagaatatggagttgcttgrgtgtgtgyggagaagagcaatgaagttgctgaaggaccagaaaagagttatgaggaggaagtgaccaaactgggatgtggagctggtgatgtgtcaggttgatggttggacttgatcttgaagatgtttcccaaccttggtgattctttgtttctgatttatatgaaataggtattggaagactctggcaatggttctatttgtccacatttcaacattctactatggggttttcagcatgtcaatgataawgaatgacttttcaaatgaagcatattgactgacagaaagacaacaaatatttcagg

SEQ ID NO: 94631 - DNA, 600 bp, Chicken  19866894563711_3
tggtaagttttgagcctcctgcttcaaggagaatatggagttgcttgrgtgtgtgyggagaagagcaatgaagttgctgaaggaccagaaaagagttatgaggaggaagtgaccaaactgggatgtggagctggtgatgtgtcaggttgatggttggacttgatcttgaagatgtttcccaaccttggtgattctttgtttctgatttatatgaaataggtattggaagactctggcaatggttctatttgtccacatttcaacattctactatggggttttcagcatgtcaatgataawgaatgacttttcaaatgaagcatattgactgacagaaagacaacaaatatttcaggccattgttctattgaataaattacagatttcatagcaataatgcagtgaacttcatgcttgttcattgattaaaagaggagatcaatgtacaacrattacatgcaaacaaaggtattggtaagaaaagcacaaataactacatttgtgctagaatatgaaagaccatatcctttaattaacactattcctttctggcttttctccatccttctcttaccagaagatagcaaactgtgccatatg

SEQ ID NO: 94632 - DNA, 600 bp, Chicken  19866894563711_4
ggttggacttgatcttgaagatgtttcccaaccttggtgattctttgtttctgatttatatgaaataggtattggaagactctggcaatggttctatttgtccacatttcaacattctactatggggttttcagcatgtcaatgataawgaatgacttttcaaatgaagcatattgactgacagaaagacaacaaatatttcaggccattgttctattgaataaattacagatttcatagcaataatgcagtgaacttcatgcttgttcattgattaaaagaggagatcaatgtacaacrattacatgcaaacaaaggtattggtaagaaaagcacaaataactacatttgtgctagaatatgaaagaccatatcctttaattaacactattcctttctggcttttctccatccttctcttaccagaagatagcaaactgtgccatatgggcaaatgacactttgccttatcaggggtttcagtagggatgtatttatcttgtgaggccaagcttaaatctcaaaatactttaaatgtgttgaattttgttcttatctgtccagtttctttcatagcggtgtgtgtgtgttccagatagc

SEQ ID NO: 94633 - DNA, 600 bp, Chicken  19866894563714_1
gaccattttgagtgtgaaagttgagcctttctgccatccctgctctttgagagggcttttcttgccatccttaagcactgacttcagaagtgactctgggaaaacattcttcatctctcctatgaactcctggaagcatctccgtacctgatctaagtgtgctgctgtaccactgtgttcccagtcaagctgctctcttctcttccccacttatcctagtctacctgtgtttcttctcagaaggcaaaactgcttctattgttgtcttgcatctttccttgtgaaaatgagggctgcaawtaaatgggctcttcatgtttggcctcttccaccacatacccgagttgctcaagtcctgactaattcctccagtgcagtgacctgccccttgtgccaagcctttagctttgtaggataagagaatgccttggrttgggagggaccttaaagayggatttgtgtcctctttcactccagctgtattttctcatctgctgtcaggtgatggctcaggtgcttctctgatacttgctcacttaagttctgtgcttgaaaatgtccttcccttgcagtattgagtgacagttcacattcggatgg

SEQ ID NO: 94634 - DNA, 534 bp, Chicken  19866894563714_2
gaagcatctccgtacctgatctaagtgtgctgctgtaccactgtgttcccagtcaagctgctctcttctcttccccacttatcctagtctacctgtgtttcttctcagaaggcaaaactgcttctattgttgtcttgcatctttccttgtgaaaatgagggctgcaawtaaatgggctcttcatgtttggcctcttccaccacatacccgagttgctcaagtcctgactaattcctccagtgcagtgacctgccccttgtgccaagcctttagctttgtaggataagagaatgccttggrttgggagggaccttaaagayggatttgtgtcctctttcactccagctgtattttctcatctgctgtcaggtgatggctcaggtgcttctctgatacttgctcacttaagttctgtgcttgaaaatgtccttcccttgcagtattgagtgacagttcacattcggatggagacagaatagtacacacaaggacaaggggcagagttttacccaatgcaagtgtagatatgttgtg

SEQ ID NO: 94635 - DNA, 514 bp, Chicken  19866894563714_3
ctaagtgtgctgctgtaccactgtgttcccagtcaagctgctctcttctcttccccacttatcctagtctacctgtgtttcttctcagaaggcaaaactgcttctattgttgtcttgcatctttccttgtgaaaatgagggctgcaawtaaatgggctcttcatgtttggcctcttccaccacatacccgagttgctcaagtcctgactaattcctccagtgcagtgacctgccccttgtgccaagcctttagctttgtaggataagagaatgccttggrttgggagggaccttaaagayggatttgtgtcctctttcactccagctgtattttctcatctgctgtcaggtgatggctcaggtgcttctctgatacttgctcacttaagttctgtgcttgaaaatgtccttcccttgcagtattgagtgacagttcacattcggatggagacagaatagtacacacaaggacaaggggcagagttttacccaatgcaagtgtagatatgttgtg

SEQ ID NO: 94636 - DNA, 600 bp, Chicken  19866894563727_1
aaaggaggctggaaggaagtatgcagagatgcagtcagcatctgcctctgcccccagcactgcggtacatgtttccatggcatgaactagaagagaagttgctgcctgctcttggttgtggcatggatgtgtggaagtttcctgagtttcttatgttatgttttggtgggaacttgttgatttcttctcaaagagaaagtgaatatgagcagataaacaggcactgagcataatggagggaactgaggaaatgaacttttcatctgtatttatatccatagatacagcaatattatattycttattagttttcaccataaccaaaattctataaaaatccatcatcatatttcctcttggactgtgtctgttaaccaaacaatacaggctcctgttatgtcctttcacataataatctttccttgcccagaccatcccattatccctcctttatgaacagctttaatctaacttattgaaatgtgaattactgggcttttacagagtattgcagataaagttttacacagtacttagtaaaacaacattaataattgtattgcttagagaaagttcttgactagcatatcagaatattgc

SEQ ID NO: 94637 - DNA, 600 bp, Chicken  19866894563739_1
atcagtctcctgctggcgaatctgatctttgcactgctccgtttctcagcaccctccttcccctcccttccttcccccgcctccttctgccgcacttattgggttaacgagacgtggggatgactcccatctaataacattccagctgagatcgtgccgtgctgggaagaaagtcactgagataattcaatttgccctacagtggtgctgcatcaacatcagcgcgtgcctggcgatggagcattgcttgtaagatctgtattcaaaccagagtctttgggctgcccaaaacacgcatcycaggttgaaatgacccctcaaggagtgcagcccatcagcccaggcacacgggttgctgtcaaagcatgaagcccttcctttagatcttttagcccttccttttaggtgtcagatcagcctggaagctcccaagggaggcagcctatggcagagaaatggctcatacagcagaaatttaaggtcatcttttggtagcgtcccacctggagagcatcactctttccatcagtgtggggctgtagcttcagctttttaactctttccctttctgccccatctccgttcagacggggtgaaatt

SEQ ID NO: 94638 - DNA, 599 bp, Chicken  19866894563742_1
  misc_feature (1)..(111): n is any nucleotide
nnnnnnnnnnnnnnnnnnnnnnnnnnnnnnnnnnnnnnnnnnnnnnnnnnnnnnnnnnnnnnnnnnnnnnnnnnnnnnnnnnnnnnnnnnnnnnnnnnnnnnnnnnnnnnncagctccccgcagcatggctgtgctggggagaggggcagtgattgtgtgggccgatggtgagccccatccatcggagggacggcagtcagcacaaggcaaaggccgtgggggccactgaggttccgtggtggggtgaccctacggctggctggctgcacacagcggtgtgtgtgtgtgcgtgtgtgtgygtgtgtgtgttctgggggcactgctctggggcagcctgcagcagtggggatgtgtgggtgcggggtttgtccctctgtccctcctggccccgagggctggggctgctgagccaagctctgtctgtgtgtctgtttgtcgctctgttctctctccccccgcaccttcctcctcgggatgatttgtccttcactttttctctctgtctttctgagctgtgaatatttttaaccctgtaaatactgtccagctcttaagaaacataggatattttatcaattgtaaatcagatcagtaatcc

SEQ ID NO: 94639 - DNA, 599 bp, Chicken  19866894563744_1
  misc_feature (1)..(20): n is any nucleotide
nnnnnnnnnnnnnnnnnnnnccttcttatattctaatgtaatgaactctttcccagctctgtctgatgcctcttggcttctctgagagatcctattcctaatttaatgagttcctcttcacatcataatgtaattaatactgccttttacagcatatcctcacacatcagtgccaaatcttccctagcaaagctatagttttttctcatcttcaaatgactttccttactttcagtttgtgaccattgcctcccatactgtcactgggcacccgtgagaagagccttttcttgactcctyctcttccccatcaggtatttacacacgtggagaaaatcccataagcgtctctgtggctctgtacagagccwcagggcttacagcgcttatattggacaaaccattgcttccccttgtgtttagcttgcagtgaaagcacctgcagtcactggatgccagccatcagcagagttcatttttcaggggcttgtgttcactgtgataacttgcatggctggggccagtgcagtattgctctgcagatgtgttggtgctaacgatgtgaaaaagaatacctatgtgctgtacgaagacaaaga

SEQ ID NO: 94640 - DNA, 600 bp, Chicken  19866894563744_2
cttggcttctctgagagatcctattcctaatttaatgagttcctcttcacatcataatgtaattaatactgccttttacagcatatcctcacacatcagtgccaaatcttccctagcaaagctatagttttttctcatcttcaaatgactttccttactttcagtttgtgaccattgcctcccatactgtcactgggcacccgtgagaagagccttttcttgactcctyctcttccccatcaggtatttacacacgtggagaaaatcccataagcgtctctgtggctctgtacagagccwcagggcttacagcgcttatattggacaaaccattgcttccccttgtgtttagcttgcagtgaaagcacctgcagtcactggatgccagccatcagcagagttcatttttcaggggcttgtgttcactgtgataacttgcatggctggggccagtgcagtattgctctgcagatgtgttggtgctaacgatgtgaaaaagaatacctatgtgctgtacgaagacaaagagagagaacttsaatatacagatgaaaaatttgagatcataattatgttgattttatacaagctggtattgga

SEQ ID NO: 94641 - DNA, 450 bp, Chicken  19866894563744_3
tcaggtatttacacacgtggagaaaatcccataagcgtctctgtggctctgtacagagccwcagggcttacagcgcttatattggacaaaccattgcttccccttgtgtttagcttgcagtgaaagcacctgcagtcactggatgccagccatcagcagagttcatttttcaggggcttgtgttcactgtgataacttgcatggctggggccagtgcagtattgctctgcagatgtgttggtgctaacgatgtgaaaaagaatacctatgtgctgtacgaagacaaagagagagaacttsaatatacagatgaaaaatttgagatcataattatgttgattttatacaagctggtattggagcttgtatatttttttaaatggtaaaaacaggaaataaaagtttcataatctcttggttttccaggaaagggagcatttccttgtctgc

SEQ ID NO: 94642 - DNA, 600 bp, Chicken  19866894563755_1
gcacgccctgcaagcacacgtgtgcccacggatgcatcttgcaggcacgttgcacggtgagtgccactcgcggcagccccggagcccttcggctgctccgtgccccctctggccctcctgctctctcccaaggcctcggctcaatgggaggaaggccccgcagagggtcagagccgtgggaaacgcttgctgccggccttggagaggccaccgagtgctgcaggaatggtgccaagcagacctccagctccaggcgcacagcaaagcttgcacgcacgcagagaggaacccccagccccraacccccggccccacacagtgtccccgtccccacgactggggggcttacgcacctctccgcccaccacgtggcacgcagcacaactcctgtgggcgtgcacgctctgctggcggctcctccaaactccagacctgggtgccccacagcaatggggacacagctcttcgcaccgaggggaaccccaacaccccagcgccacacccaggggtaaccccccsccttggggaggccgtgctgggtgcagggggggctggcaggctctccgctccagctgtagggcggcctgcttcctctgataa

SEQ ID NO: 94643 - DNA, 600 bp, Chicken  19866894563755_2
gcaggaatggtgccaagcagacctccagctccaggcgcacagcaaagcttgcacgcacgcagagaggaacccccagccccraacccccggccccacacagtgtccccgtccccacgactggggggcttacgcacctctccgcccaccacgtggcacgcagcacaactcctgtgggcgtgcacgctctgctggcggctcctccaaactccagacctgggtgccccacagcaatggggacacagctcttcgcaccgaggggaaccccaacaccccagcgccacacccaggggtaaccccccsccttggggaggccgtgctgggtgcagggggggctggcaggctctccgctccagctgtagggcggcctgcttcctctgataaagggacttggccgtactcccagttcccggcttgctggcgtgcgagcgcacagccccgctgagagccgcgattttcctttttctctccaactttgtcaccgggaccccgtcccacaccccgccccactgcgccctgcgagcatccctttgcgtttggggatgcagggatggagagcacgtggatgggaagcgtgcgggagtggccagctcgctaattgga

SEQ ID NO: 94644 - DNA, 600 bp, Chicken  19866894563766_1
ccttggaaggctcagacaactcagatgaagaaagaaccagatttctacatctgtgaacattcaagacaggagaaaaaaagtatcttatgatgatgatgactgctatatttaaagaaaaggcatacatgtcttaagagaatttcaaatatatttctaagttgctggtttgccaaattagatggcaggactgttctgaacttttacttctgagggattgtctttcaaaaaatcttttataactcttcatattattctcctacacttcaagaagtgtctctatctctcttttactaatcactwtttgcaacattcattttcctttttcaaaaaaaattatgaacacaataccagatttgtaacatttctaacaattgctgttcacacaactacagacattcaaggaggactattgatatatgatcctctcatgcaagtagatttttttttaatcttttatctatcttcttaaaaaataatctagtatagataggcattaaaatttgattcatttctggctttattgacttcttagcacacacaaaccagatgaaccacttggtatacatatatactttaagtggcttttacagttgtgatgga

SEQ ID NO: 94645 - DNA, 599 bp, Chicken  19866894563776_1
  misc_feature (1)..(1): n is any nucleotide
naatcatataggatttgtgctgtgcacgtaagcagagatcttcccccatttaaagagttaattctttatgaggctccatagatggttactcatcagtgaatatttaaagaggcagagagtatagtgtgcagttagtgtttcaccctccacactaccgctaaatacccagtatgtaaactactggtgaggttttcaaaggaataccaaagagcttaaaaaaatcccgtggaagggttctccttaatcttacccacatgcctctgcacaaaatggtgagtacatactgtgaagtaagactgrggraaataaatgtgcttaggtctttttaagatgctactttctgtagcagattaagtaactaaaggatttccttaacrgtaagaaaataataccctatcaatattttcttgaacagagttcttgtatttacatttattttgacttttctctttcttacgtttctcctgattaaaacactctgctattgtttttctttgagataaacgttgcataatttcttaggtgcattgagatatctaaggcaaaacagaaaagtgatcagttcattctcttttatccacactttctactttgccaaa

SEQ ID NO: 94646 - DNA, 600 bp, Chicken  19866894563776_2
tcatataggatttgtgctgtgcacgtaagcagagatcttcccccatttaaagagttaattctttatgaggctccatagatggttactcatcagtgaatatttaaagaggcagagagtatagtgtgcagttagtgtttcaccctccacactaccgctaaatacccagtatgtaaactactggtgaggttttcaaaggaataccaaagagcttaaaaaaatcccgtggaagggttctccttaatcttacccacatgcctctgcacaaaatggtgagtacatactgtgaagtaagactgrggraaataaatgtgcttaggtctttttaagatgctactttctgtagcagattaagtaactaaaggatttccttaacrgtaagaaaataataccctatcaatattttcttgaacagagttcttgtatttacatttattttgacttttctctttcttacgtttctcctgattaaaacactctgctattgtttttctttgagataaacgttgcataatttcttaggtgcattgagatatctaaggcaaaacagaaaagtgatcagttcattctcttttatccacactttctactttgccaaagtga

SEQ ID NO: 94647 - DNA, 600 bp, Chicken  19866894563776_3
atagatggttactcatcagtgaatatttaaagaggcagagagtatagtgtgcagttagtgtttcaccctccacactaccgctaaatacccagtatgtaaactactggtgaggttttcaaaggaataccaaagagcttaaaaaaatcccgtggaagggttctccttaatcttacccacatgcctctgcacaaaatggtgagtacatactgtgaagtaagactgrggraaataaatgtgcttaggtctttttaagatgctactttctgtagcagattaagtaactaaaggatttccttaacrgtaagaaaataataccctatcaatattttcttgaacagagttcttgtatttacatttattttgacttttctctttcttacgtttctcctgattaaaacactctgctattgtttttctttgagataaacgttgcataatttcttaggtgcattgagatatctaaggcaaaacagaaaagtgatcagttcattctcttttatccacactttctactttgccaaagtgaagaaaatgtctattagctttcagcaagtaaagatgacttgaatcaagtctggcatggtaaaaacaaaacaaaac

SEQ ID NO: 94648 - DNA, 600 bp, Chicken  19866894563776_4
ccaaagtgaagaaaatgtctattagctttcagcaagtaaagatgacttgaatcaagtctggcatggtaaaaacaaaacaaaacaaacaaacaaacaaaaaaacaatttactagaagtgcaaatttttactgaaagaaacaaagttgctttcaaagctggaagacagtccagatctgctatcacagcctattatctggtatcctctttcttaaagtagtcctcagaacttattgctactctttttgaaagactcttccagcacctggatgttctaatggctaagggatgccctctgccctytccttctaattccagtctaactttgtctctggccaacttgtgtggcattgtacttttgatggtatttagctgaaacaggttttaccattcttactatgtgtttccgtcatttaggagtagccttttatactctttccaagccttttattttctagactaaacaagtcaggctgatataagataaactctctgttcttcatctcattctaatggcagatctgttcacctgtttcagttcttgaaaaacattgtctgactttgtgcaaaatattccacatgagcttttgtacgatatcacta

SEQ ID NO: 94649 - DNA, 600 bp, Chicken  19866894563783_1
tagctcctttccattgtcaacatggatacttgcagtccgtattcttcagcgaagcttctcagtttgcactgaaacaaatggggagttgccttctctgatgacttgcagttttattacctctttctgtttaaagttgctgtagaacatatctgacaaatctggcaacctgtaagcctaaacttgggtactgatattccaaagagtaaagcagagttgcaacctaacgaacttctccttagcagtatttctattgagtggattacaaagacttgctgttgggcaatcagggaggagattgaraagaagcacagtgattcttgtgacttaaaaaagcagtaatgyaacttgtaacagttttggaaacaccagctctgtgttcaggttgccgctatccttcatgaggtgcttgaatggaagttatatttaaaactaatacttgggcacttgttgaaggcaggatgttctgcagggtctcragctcactcacaaagtgaatttttgtatgtatggggctgtggagctcaggtgaaaaggagaaggggcccttaggtgagtaattcagatgcagccggcttccccaggctcttgtcctgatattgg

SEQ ID NO: 94650 - DNA, 600 bp, Chicken  19866894563783_2
tcttcagcgaagcttctcagtttgcactgaaacaaatggggagttgccttctctgatgacttgcagttttattacctctttctgtttaaagttgctgtagaacatatctgacaaatctggcaacctgtaagcctaaacttgggtactgatattccaaagagtaaagcagagttgcaacctaacgaacttctccttagcagtatttctattgagtggattacaaagacttgctgttgggcaatcagggaggagattgaraagaagcacagtgattcttgtgacttaaaaaagcagtaatgyaacttgtaacagttttggaaacaccagctctgtgttcaggttgccgctatccttcatgaggtgcttgaatggaagttatatttaaaactaatacttgggcacttgttgaaggcaggatgttctgcagggtctcragctcactcacaaagtgaatttttgtatgtatggggctgtggagctcaggtgaaaaggagaaggggcccttaggtgagtaattcagatgcagccggcttccccaggctcttgtcctgatattggctttggatttgagagagcagcagctatctgtattagcctctc

SEQ ID NO: 94651 - DNA, 600 bp, Chicken  19866894563783_3
aaacttgggtactgatattccaaagagtaaagcagagttgcaacctaacgaacttctccttagcagtatttctattgagtggattacaaagacttgctgttgggcaatcagggaggagattgaraagaagcacagtgattcttgtgacttaaaaaagcagtaatgyaacttgtaacagttttggaaacaccagctctgtgttcaggttgccgctatccttcatgaggtgcttgaatggaagttatatttaaaactaatacttgggcacttgttgaaggcaggatgttctgcagggtctcragctcactcacaaagtgaatttttgtatgtatggggctgtggagctcaggtgaaaaggagaaggggcccttaggtgagtaattcagatgcagccggcttccccaggctcttgtcctgatattggctttggatttgagagagcagcagctatctgtattagcctctccacacytagatatttctatccccccctcctttatagaagtatcagcatgacagtgtacagcttctggatactgctttgattttttaaacagcagattttttttttttcccccataatcttcccctctgtactgg

SEQ ID NO: 94652 - DNA, 501 bp, Chicken  19866894563783_4
taacagttttggaaacaccagctctgtgttcaggttgccgctatccttcatgaggtgcttgaatggaagttatatttaaaactaatacttgggcacttgttgaaggcaggatgttctgcagggtctcragctcactcacaaagtgaatttttgtatgtatggggctgtggagctcaggtgaaaaggagaaggggcccttaggtgagtaattcagatgcagccggcttccccaggctcttgtcctgatattggctttggatttgagagagcagcagctatctgtattagcctctccacacytagatatttctatccccccctcctttatagaagtatcagcatgacagtgtacagcttctggatactgctttgattttttaaacagcagattttttttttttcccccataatcttcccctctgtactggggtaaatatatcactaattaacctaacccttccatggaaggaattaccttgcctttttggttactgagtgtgt

SEQ ID NO: 94653 - DNA, 600 bp, Chicken  19866894563785_1
tgagatgatctggtctacgtgactgatacacagtgataattgatagcaaagtgcattgctagaccttttcactacgtgtaattatatatcagcacataccctcaagagattaattactgcctgatgtgcttttggagcaaaggtaagctcagggaggcccgcctctccctcccccaaccttgtattttcctaaggaaggagctttgtttctaatagggggtgtttgagtcaatattagcagaataccatctactgagcattgtgtctgcataccagctgtgcaacaggtgtgacacacaygcacacccatgtgcgctcacactcctgcacaccccctgccagatccacaccttcctcctacccacgtgcagatccagaggtggtgaggagagagaggagcaggggagaagggctgggatggaaaccgtcagctttcccagattgttactacctttgttttcttttaatagagcaaatttattgggataggagaaccatcagactgattcagacatgcctctattttggatcacagaatcatagcattgttaggtttggaaaagacctctgagatcatctagtccaatcatgctggtgcaa

SEQ ID NO: 94654 - DNA, 599 bp, Chicken  19866894563789_1
  misc_feature (1)..(180): n is any nucleotide
nnnnnnnnnnnnnnnnnnnnnnnnnnnnnnnnnnnnnnnnnnnnnnnnnnnnnnnnnnnnnnnnnnnnnnnnnnnnnnnnnnnnnnnnnnnnnnnnnnnnnnnnnnnnnnnnnnnnnnnnnnnnnnnnnnnnnnnnnnnnnnnnnnnnnnnnnnnnnnnnnnnnnnnnnnnnnnnnnnnnctgtgtaaatccaggctccagttaatcaacttcttcatccaaagcagagatggaaacatgctcatctttgcagtttaggtaattccttgagagcttgatgtagaaactgaggacagtgargatgttcaatgtccattccatttcacagtgtgattgttttgctcagtacacatgagtactttcatatacaatgtcaattctaaattcacgcggtcacttcagtactgagatatagagtcccatgtgatatgaaatgaacatcttagtctcttcctgagctatgcattagtagttttgtgattatatagactcagctacaaaaatacttttctgggaggtagctaactcaaagtgcttgaaacatatgtgtttagtttcctgggcttacgagggtctgttggtgcaaggcagactcttca

SEQ ID NO: 94655 - DNA, 600 bp, Chicken  19866894563789_2
tcctgagctatgcattagtagttttgtgattatatagactcagctacaaaaatacttttctgggaggtagctaactcaaagtgcttgaaacatatgtgtttagtttcctgggcttacgagggtctgttggtgcaaggcagactcttcagaaaatcagaaaacccagagtcactgggaacttccaaaatttacctctgataatcttacagcagagaaaaaggaaagatgggaaaaagaccgaatctttgagtgagctgcatgtatcaaacatcctgagtattcactgctcagtgtgaggamagatactaccatatattaatctttgttatcacagtcatctggtgacatttcatgaagccaattagaaattttggaaatcacagtttaaagcatcctttcttcaggaaactttgaataaagcaaccttgcctcaagttgttcacccatttcatcaataatccctctgttctagatggcttcctgcggaggagggtcgtcttttgtctcttcctgatgggttccacagcaggacagtagcctaatccttctctgttaaggtttccactcattatatcggtagtgttactacatctatcgcta

SEQ ID NO: 94656 - DNA, 600 bp, Chicken  19866894563795_1
caataaagaggcttaggtacttttatccaccactaaggaaacatgggatgctctccattcagtttgttggaagatgattctctgattggaattaaaaacaacttatcctttccaaaggaactcaggtttgtctctttctccctccaacttaattatagttcagattagaaacagcgctgagttttccaaagtactaaccaatattaaaactcatctgtgcagaggggcaaaatgaagcatttagaataccaatatactccacagatcagaaatcaaaaggaataagtcataatctatacrtatytgacttgtattacccttttcaataaartttctaaactgtttgcaatagctcacctgggcaatttcaatctttttaggtatcagtggctcagaaatatgcggattcgtctgatacagtggctgggaagtatacttctcagtctcttgagacagtgatgctgatgcctggaggaagccatacattgacacgctattattacaagtacaacagaaggcaaacagttctgctagaagtatgcaataccagtgcataagttgaaaacaggtggattttgaaagaccaggataaacaataag

SEQ ID NO: 94657 - DNA, 600 bp, Chicken  19866894563795_2
aaagaggcttaggtacttttatccaccactaaggaaacatgggatgctctccattcagtttgttggaagatgattctctgattggaattaaaaacaacttatcctttccaaaggaactcaggtttgtctctttctccctccaacttaattatagttcagattagaaacagcgctgagttttccaaagtactaaccaatattaaaactcatctgtgcagaggggcaaaatgaagcatttagaataccaatatactccacagatcagaaatcaaaaggaataagtcataatctatacrtatytgacttgtattacccttttcaataaartttctaaactgtttgcaatagctcacctgggcaatttcaatctttttaggtatcagtggctcagaaatatgcggattcgtctgatacagtggctgggaagtatacttctcagtctcttgagacagtgatgctgatgcctggaggaagccatacattgacacgctattattacaagtacaacagaaggcaaacagttctgctagaagtatgcaataccagtgcataagttgaaaacaggtggattttgaaagaccaggataaacaataagtctg

SEQ ID NO: 94658 - DNA, 600 bp, Chicken  19866894563795_3
actaaggaaacatgggatgctctccattcagtttgttggaagatgattctctgattggaattaaaaacaacttatcctttccaaaggaactcaggtttgtctctttctccctccaacttaattatagttcagattagaaacagcgctgagttttccaaagtactaaccaatattaaaactcatctgtgcagaggggcaaaatgaagcatttagaataccaatatactccacagatcagaaatcaaaaggaataagtcataatctatacrtatytgacttgtattacccttttcaataaartttctaaactgtttgcaatagctcacctgggcaatttcaatctttttaggtatcagtggctcagaaatatgcggattcgtctgatacagtggctgggaagtatacttctcagtctcttgagacagtgatgctgatgcctggaggaagccatacattgacacgctattattacaagtacaacagaaggcaaacagttctgctagaagtatgcaataccagtgcataagttgaaaacaggtggattttgaaagaccaggataaacaataagtctgaagggcactaaatggttaccttaacca

SEQ ID NO: 94659 - DNA, 600 bp, Chicken  19866894563795_4
ttcttgtgcctagcctatctccagtcacgtaaatcctgatcacaaacactacattggcaaaaacagaacattctcctaaaaaaattagatgtttggcatagtacaagttctcttgattcacattaaatgaagatgtttaagtataagaaattttattgcattgtaaaaagacagtgtcaagaaccaggctaaaaccactgattcaagaaatagaagacaaagaataagtcttgatgggcatgttatagttatacagtatattgaggaatgcagtaaatgctatgtatactgtatactgayagcatgtacattagcagaaaaacttcattataatctacatacacagagtccattgtgaaacttaactgcatttccagtcacagaaatacagatctaagacagtcatcagcataaactgaaactatttcttcagcttttaatatttaaggaatgctagctgaagatttaattgcatataaatacaggtaagtcagcaaactgaggtcttatctcaataccagtcagtcagatgccaagcatttcttccattactgcatgagggaacatctgctttcatcttacagtctgctattgcatgac

SEQ ID NO: 94660 - DNA, 599 bp, Chicken  19866894563821_1
  misc_feature (1)..(158): n is any nucleotide
nnnnnnnnnnnnnnnnnnnnnnnnnnnnnnnnnnnnnnnnnnnnnnnnnnnnnnnnnnnnnnnnnnnnnnnnnnnnnnnnnnnnnnnnnnnnnnnnnnnnnnnnnnnnnnnnnnnnnnnnnnnnnnnnnnnnnnnnnnnnnnnnnnnnnnnnnnnnnngtcccatttaaaatgcaccgtcgcagaagaactttgaacggtgcgtagggaatttcaatcctgcttggggatccattcccttcatggagaggcaggcgtgctcagcatggagaggcagaaaccacgggctgctttgcgcagyccccamgtcccaactccggtttccaaaccagagtcactcttacacagttataaaatgtgactggtgctgatgctctgcacacagatgaacccaggctggactcttcccattcagctgctgcagaacacttgtgcggacagttacaccttctgatacgagctggcagaatatagatcataaagcatgtccacacaacatcactcaacttttaacctaataggatgtggctgattgtaattctccttccagaattgggaagattttgtttgcaagcaacagaatcctcccgttctcctgat

SEQ ID NO: 94661 - DNA, 599 bp, Chicken  19866894563821_2
  misc_feature (1)..(152): n is any nucleotide
nnnnnnnnnnnnnnnnnnnnnnnnnnnnnnnnnnnnnnnnnnnnnnnnnnnnnnnnnnnnnnnnnnnnnnnnnnnnnnnnnnnnnnnnnnnnnnnnnnnnnnnnnnnnnnnnnnnnnnnnnnnnnnnnnnnnnnnnnnnnnnnnnnnnnnnngtcccatttaaaatgcaccgtcgcagaagaactttgaacggtgcgtagggaatttcaatcctgcttggggatccattcccttcatggagaggcaggcgtgctcagcatggagaggcagaaaccacgggctgctttgcgcagyccccamgtcccaactccggtttccaaaccagagtcactcttacacagttataaaatgtgactggtgctgatgctctgcacacagatgaacccaggctggactcttcccattcagctgctgcagaacacttgtgcggacagttacaccttctgatacgagctggcagaatatagatcataaagcatgtccacacaacatcactcaacttttaacctaataggatgtggctgattgtaattctccttccagaattgggaagattttgtttgcaagcaacagaatcctcccgttctcctgattgcttg

SEQ ID NO: 94662 - DNA, 600 bp, Chicken  19866894563821_3
ccaactccggtttccaaaccagagtcactcttacacagttataaaatgtgactggtgctgatgctctgcacacagatgaacccaggctggactcttcccattcagctgctgcagaacacttgtgcggacagttacaccttctgatacgagctggcagaatatagatcataaagcatgtccacacaacatcactcaacttttaacctaataggatgtggctgattgtaattctccttccagaattgggaagattttgtttgcaagcaacagaatcctcccgttctcctgattgcttgttcyagtggttaatttttctcactcttaaaaatgcatgccttatttctcatttgaatatctctaattttaattagcagccattggctcttgttgctaaattaaacagtcctttgctattaagagtccttgcattcagctgatacatactgcactgcatttcctttgctaaactaaacrcataatgatttttaaatctctcacaactcagcattccaggtgctcaataattcctgtgtcccctatcaatatatagatgagcagaccaccagtgggaggagcaacactgagcattggagctgcaac

SEQ ID NO: 94663 - DNA, 468 bp, Chicken  19866894563821_4
atgtccacacaacatcactcaacttttaacctaataggatgtggctgattgtaattctccttccagaattgggaagattttgtttgcaagcaacagaatcctcccgttctcctgattgcttgttcyagtggttaatttttctcactcttaaaaatgcatgccttatttctcatttgaatatctctaattttaattagcagccattggctcttgttgctaaattaaacagtcctttgctattaagagtccttgcattcagctgatacatactgcactgcatttcctttgctaaactaaacrcataatgatttttaaatctctcacaactcagcattccaggtgctcaataattcctgtgtcccctatcaatatatagatgagcagaccaccagtgggaggagcaacactgagcattggagctgcaaccggactggaaaatggagagggacagagccatggggtgaagag

SEQ ID NO: 94664 - DNA, 367 bp, Chicken  19866894563822_1
ccatcgctatgcagcctgtgagcaacgctggggaaagtgacttttggctgagcacactgagttgtgctttccatggaaaggaattgatgtctgtttacaaccacctgtgacccataagtctggttcatagtcctttcttaatttatcaacaaattcaataaagtgtcttacctttctaaagagtctgtgtgaatgcgtgagaatctgtggggaaggggaaatccacaggtttgctttatgataagacatttattgcaagcaaagctcttcaaacctgaattaccctcacttttatgtccwgatgaccagaagagcatgcaagaatgtgtgaaattcacaggacagtgtaggtaaaggatgttatccc

SEQ ID NO: 94665 - DNA, 600 bp, Chicken  19866894563825_1
cgctgtcctcaaaacatgtggttcctctgctgcttccacccagcttgtccccgctgctgccggtaggtggaagcatcactacgctccatttctgggcgacttgcatctcgactcggagagcacagggagatggggttttcctgggatagcagtaactgtgtgtggggggagagggagcgcagctaaaaatgctctaggttttgtgacgagtcggtgtgggaagtagattccgtttaaatgcactcacttcaaatgagaggcactttgaaggagaataggtgtgtctacctgccatagaartactgctctgcaatcacacttgggtctctgctgccttcctctaggaagggtttgagtcaaaacaggctctggtctggatctctcaggatgagccttgtttctgcctttgatctttccttaggagaatgacaccatccttcctggcttacatccccctgcagaatgctacatgcatcagctccccagcctgtgccttcagggctgtgcaccaaggtgtgagtacactgcttctgacaaggaagaaactctttacrataagggcggtgaggcactggcacaggctgcccggagagggggggg

SEQ ID NO: 94666 - DNA, 401 bp, Chicken  19866894563825_2
gagaggcactttgaaggagaataggtgtgtctacctgccatagaartactgctctgcaatcacacttgggtctctgctgccttcctctaggaagggtttgagtcaaaacaggctctggtctggatctctcaggatgagccttgtttctgcctttgatctttccttaggagaatgacaccatccttcctggcttacatccccctgcagaatgctacatgcatcagctccccagcctgtgccttcagggctgtgcaccaaggtgtgagtacactgcttctgacaaggaagaaactctttacrataagggcggtgaggcactggcacaggctgcccggagagggggggggggtgcccatccctgcagacagccaaggtcagctggatgggctctgagcacctga

SEQ ID NO: 94667 - DNA, 600 bp, Chicken  19866894563831_1
tacagataccaccaaaatgctctcctttttattggaccctaacttctttaagctgatggcttaaagtgagatctcaattggcactgaaatttcaatcacttatctcaacaatgtgccacaggatgctgtttcccagccactgcacatgtggagcagtgtatttggcaaacctaaggcactgcagctaagggaaagaatcactaagataggaagaaaatgaaatgaaagtaatcactgcaggataccaatcattacatcacatttccatacatataaatatttggtagaaccctgtaaagraattgagcaaagctgaatataaaacagctaagcaaccatgtacagctactgtttgctgattctgtttttccccaaatatttttctttggcctactgggatatttaacaaaacaggagaccttggactagaaagtgattaaataaataatcaatcaaagtttattatgatctccagaaagagagagggtttgctttaaagcaaactgtcagcacagcttctgaacgcacctgaaggtatgcagggtcaagtggcagaagtttttcccaaataagaagcaaactcttcttgactttttttcc

SEQ ID NO: 94668 - DNA, 600 bp, Chicken  19866894563833_1
gatcaagaagaaaattagttacaggaatttggttgtaatgtaagcattataggcttcccctgaagtgttaaatatgcacaaaaaatatatatatctgtaacagtgtggcatgtactttaattgccatcctttggtattacagtatcagcaaacagagtaatatttgaaatattaataagggagaagttgcctgaatatgttgcatttatgtaataaagggctctgtttgatgtggattaatgctcaagtaaatactgtatattatttgtttttgtaaatacttccttgctcattctatgyactgttttatgcaatttttaatggaaccatcaaaaatatttacaaatctgctttggaaatggcaacttttgatgtcttaattttcccatgaagtatggttggccttcattagaattcaggattttaagactctttgatataatccttctataatttacatggagcttaaaactaatagaaactgcgatatatggtctctctgagaacaagcattttgtgcattgtttgttgtgttttttgaaatcccaatatgtctgctcagcacaggggatgttctgcagtagaaccgcatcatgaaaa

SEQ ID NO: 94669 - DNA, 557 bp, Chicken  19866894563833_2
ttaagactctttgatataatccttctataatttacatggagcttaaaactaatagaaactgcgatatatggtctctctgagaacaagcattttgtgcattgtttgttgtgttttttgaaatcccaatatgtctgctcagcacaggggatgttctgcagtagaaccgcatcatgaaaagtcagtttgattatgtgctgcagatgtgcagaacagtttgaaagaaactgtagaagaaacaataaagatttcataggctgctaaagcctggagctaaacttttacttcttactttcatggacragatttgtttttggaatagtgaagactgcaatattaccaaataacagcaaagtagacttccaactctggctcagcaactgaagtgaacccatccttatgggggctggtaattgcctcctggggagctgcagttcagtgtcaaagggtctgagaaaccattgctccctgagctgtgaacttgccacttctatggggactctacctagtggaggtaaaaaatcccactatagttttcttgggtaaataatattttagtt

SEQ ID NO: 94670 - DNA, 600 bp, Chicken  19866894563838_1
ggttgttcattttgttcttcatgatagacatcagctccagttggcacaggaaggagatcagcagcatccagggccccctggctcacaaagaagtaaaatacagatctgttgctcccagcagggtgatggctctgtactttactgagctgccaggggtgctgtgggctgaactgtcttgcagctttatgcagcctgtagatctccagaggaggccagcctctgtctatgaggaaggctggtgccagaatgcgtaaaagcatggctgaataatagcacagctgcaagtgcttcccagagaaragagctagctgtgctgagagagtttgcagaggctaaatccccttgcatcccatgaaatcgtggagatgactaaaggcttgcttgatctccttagtcccacctaccctataggaataccatgytgggggaacaaattacaagaaaaatcatctctaaacattgttgaagacatattgcagattctgagaaatgcacagtgataaccatacgttttgctgctacgttctttcaactctacctttgtgaaggagcacctggaaacaattatttactggcagaaagtcccggaaggatcaggag

SEQ ID NO: 94671 - DNA, 600 bp, Chicken  19866894563838_2
gtgatggctctgtactttactgagctgccaggggtgctgtgggctgaactgtcttgcagctttatgcagcctgtagatctccagaggaggccagcctctgtctatgaggaaggctggtgccagaatgcgtaaaagcatggctgaataatagcacagctgcaagtgcttcccagagaaragagctagctgtgctgagagagtttgcagaggctaaatccccttgcatcccatgaaatcgtggagatgactaaaggcttgcttgatctccttagtcccacctaccctataggaataccatgytgggggaacaaattacaagaaaaatcatctctaaacattgttgaagacatattgcagattctgagaaatgcacagtgataaccatacgttttgctgctacgttctttcaactctacctttgtgaaggagcacctggaaacaattatttactggcagaaagtcccggaaggatcaggagccacaatggaagttagcctagagttcatctcttggcacaaatgtctttttgagctcatgccattaataacttctactagcaacatgcccaggttgaaatctttcataggacaagttgcaata

SEQ ID NO: 94672 - DNA, 600 bp, Chicken  19866894563838_3
gggggaacaaattacaagaaaaatcatctctaaacattgttgaagacatattgcagattctgagaaatgcacagtgataaccatacgttttgctgctacgttctttcaactctacctttgtgaaggagcacctggaaacaattatttactggcagaaagtcccggaaggatcaggagccacaatggaagttagcctagagttcatctcttggcacaaatgtctttttgagctcatgccattaataacttctactagcaacatgcccaggttgaaatctttcataggacaagttgcaatayctgtagttatatttttttaattattattttattattattaattttaagaaagagctatatgttagctctaaggtgggagcagatggcttctggaagaagggtttttctttcctagtaagtaagcagtacccacaaactatatatatatagaatggttagcatctgtgacattgcttaatttcaatatgtcacggggcaaagactggtcacactcttttatctggactattatttgcaagaaaattgaattttggcaaggttattctgttcagatgacaagtgagagtttcgtggcagact

SEQ ID NO: 94673 - DNA, 600 bp, Chicken  19866894563844_1
aaacatatgaaaagggacgatgtgtaattttatttttcagtcagattgccaagtccagttacaaccacagataattccaccaaacatggaggagtacatgaacagcctcctaactgcagtgctcccttctgtgttgaacaaatttcgaatttacctaagtttgctgagactgctggattacagtatatctgatgaagtgacaaaggtatggaagatttccctaattgattttcagctccatattgagacaggaagcgccttaatgtgttactgtacttgctcatttctctgccaggcagygattgttggaagttcaaaaagcattttattgtcacggatgtgtgtgccttcaagggtttgtactcatgagtgcttcagtgtatagagtttatacgcatcgtgctttctaaaactcactttgaaaataattatattcaaagacaagctagcctatttttattcaagctgactttctgacaacgtttctcctgtaatctaaggatagttgtggtgtttgaaggcttacactgaagctcctttattgccacttaattgtttgcggtactgtttataggcagttgaagaggactttgtagaaat

SEQ ID NO: 94674 - DNA, 600 bp, Chicken  19866894563851_1
ctggtgagcaggagtggggttggtggaggaataagagaccttaatggagcagtcctgctctattcatgcgagggcacagacactcatcagtgcgagtgcttcgtggctgaaggggacatctcctggcaggtgaaaggtttggtcaagatggtgtggatccagcacggtgtgcccattgcctgtcagcattgtggccctgatgagtatgttctcccttgggagctgagagctgccgtggcaaagctgctcctagaccctgggacaggcattaggtgtaaagggtgtttggcttcattaacrgaagccttttcctgtcctcgtttacaccagcttgaagcagagatttggtcctacagaacaacgtgctgtttttccccggggagaagtgggtcaggagagttggaggtctgccactgcctgacattcctgtctgtgttttagaaaagctggaggaaattcgggaccaagaacgcaaagaggacaccttcactccaatgcccagtccctattatatggaactcacaaagctgctcttaaactagtaagtgggaaatgtattgtaacagtttccacctgactacatgcttgcatagacaattt

SEQ ID NO: 94675 - DNA, 599 bp, Chicken  19866894563864_1
  misc_feature (1)..(106): n is any nucleotide
nnnnnnnnnnnnnnnnnnnnnnnnnnnnnnnnnnnnnnnnnnnnnnnnnnnnnnnnnnnnnnnnnnnnnnnnnnnnnnnnnnnnnnnnnnnnnnnnnnnnnnnnnnactgggaaggagaaatttgcatctctctgtggctgtagtaaagaagatctttttcttaactgatttttcatggcccactggcttttattttggtttagacacaaagcaggaatgccttctgcctcctgagagtttaggttaaaataagtactgtgtgcttcatgctagccctaatgtgtgtgctggggcctttrttttccacagtttgcagcgacttttatttaggtcctctgcttgtttatgatttatgaggctttcactctgtctatcgcctttaacaagcatggtgaagaaaagagaaagcttttagcttcaaggcgaaaagagaaaagcaacggtttctcttattcctttaatgcaatttaaaggagattggaagttaaggaagctagaaagtgaaggatgggatggcagagggagatgaaagaaaaccccaaatacctttaatttgcctgggaggagaatattaggatagacagggatggctttttcc

SEQ ID NO: 94676 - DNA, 600 bp, Chicken  19866894563869_1
gacttgcaggcctcaaaggacagttcaattctttttaattttataggtgccatcaaataaacatttaaaggctttttattattattcttttgattgcttttgttcatttgtttgttttttagtgggttttgtttgtttgttccccaggggaacagaaggaaaatcaggctcgggactatgcatgcactgtaataacttattaaaccagcccagggagatttgcattttctggacacagagaaacttctacaagggagaaatcccaagggagggattgggtatccgcatcaatctctaccrgtttcggcctcatttccaccataggtggaggaagaaagcagattcaaaccgctggctggggtgaaggaaaggctgtgtcccagggggcagtgggcatggaacgggatgcccagggcagtgtgcatggcttcaagctgcagaagctcatggagcactgggactctgctctcagacataggggttgggtttgggtggtgctgtgtggagccgagggttggacttgatgatccttatgggtcccttctaacttgggctcttctgtgattctatgtcatggggcaaggaaggcctgtctcgctc

SEQ ID NO: 94677 - DNA, 600 bp, Chicken  19866894563870_1
ttaattttgatatatttttttttttggctgagaaacagattaatatgtagcttctgcagcctgaaataaagacaaaacagtagctttattgagaaaaagcagaggaactcagctaggtgcatttaatgaccactattacaccagctgcattgtaggacacaagttcatatccagctggagatgagcgctttcaggtaccagctgtccttatgttcaacatagtcccagttcttcaatacctaaataactcatatctgcaaaccaatctgcagtgcagactttggatagttacgtgcaacygtgtctgtgttgggcaagggaagaaccaaggagcaggtggtatttaagtggtagttggttttattgttggtttgggttttttggtttgttatttagaatcatagaatcataaaatcatgaacgttggaaaagacccaccggatcatccagtccaaccattcacctctcaccaatggtcctcactaaaccwtgtccctcagcacaacgtccaaccgttccttgaacacctccaggggtcggtgactccactgcctctctgggcagcccattccagtgcctgatcaccctttcagcatttat

SEQ ID NO: 94678 - DNA, 458 bp, Chicken  19866894563870_2
tcaggtaccagctgtccttatgttcaacatagtcccagttcttcaatacctaaataactcatatctgcaaaccaatctgcagtgcagactttggatagttacgtgcaacygtgtctgtgttgggcaagggaagaaccaaggagcaggtggtatttaagtggtagttggttttattgttggtttgggttttttggtttgttatttagaatcatagaatcataaaatcatgaacgttggaaaagacccaccggatcatccagtccaaccattcacctctcaccaatggtcctcactaaaccwtgtccctcagcacaacgtccaaccgttccttgaacacctccaggggtcggtgactccactgcctctctgggcagcccattccagtgcctgatcaccctttcagcatttattttgatgcctttattcttagaatatctggtgcttgaatggtgtaacca

SEQ ID NO: 94679 - DNA, 600 bp, Chicken  19866894563890_1
cttataaagaccataatgtaacattcatcgttatagaagcaataaatacaaaaaatactacaggaaaaaggctctagtcatatctaaaaaacatgctctctgggcttttaaggttgctttcagtctcttcttgcccttgtcacagcagccttccatttcatcctcctgtggcacagcacggcctcaagtcctctgtttatgcctccatttggtgccaggctcagaaactactttctcacccctccttaaatttgatcagtatctgtatgtggacacttcagaggtgcaagcatagggacrcaatcctaacaaccagcaagggctccatataaattgtagttgctttctctgatagttttctagacttgagtgttcattcctcagttggtcttctgcaatttcttctctgcttgttttgaatttagaagaatgggttagagtgacccttttcttcccttcttgtatggcctattgctatttgcattcctaggcaatggaccaagtcctgggctctgttagaaaacatatttttcaaataacattctcccttctacagaacacccatttatgtcaaatgcgctattcagtgggctacctcag

SEQ ID NO: 94680 - DNA, 600 bp, Chicken  19866894563895_1
atgagctttttgttggatcagatcaaagcaaatagatttctctgtaattttacctcttttatagaatttgctcattgtgtaagctaggcctttggttacaggtcagttactcttgaaacactttcatctgtgtgcataagcatgttttttgctctcagttattgcagtgggtacttacatacgagttttagttcacctttaattaaaattagtgacttgtcattctctaccgcaccgagagatacagtaatgataactatataaatcaatgaacatagtttatttcagaagacttttaaygcacactgctgtgattgtatttaaaatgtgtgctctaatttcaaacgtactctttttgttgtcatttaaacawgatatctattttgctccttggctgaatagggcgctaatttcctttctccagtcattttatagatggttctagttatgggtaatagttgtaagcaggaagtcttttggattgatgataagtatttcttagttgcgtgttgcctaattgtatcctgtaaattacactttcccagtagttattttaaaagaaaaattatgttttgctgtttacaggaactgacacaggta

SEQ ID NO: 94681 - DNA, 600 bp, Chicken  19866894563895_2
attgtgtaagctaggcctttggttacaggtcagttactcttgaaacactttcatctgtgtgcataagcatgttttttgctctcagttattgcagtgggtacttacatacgagttttagttcacctttaattaaaattagtgacttgtcattctctaccgcaccgagagatacagtaatgataactatataaatcaatgaacatagtttatttcagaagacttttaaygcacactgctgtgattgtatttaaaatgtgtgctctaatttcaaacgtactctttttgttgtcatttaaacawgatatctattttgctccttggctgaatagggcgctaatttcctttctccagtcattttatagatggttctagttatgggtaatagttgtaagcaggaagtcttttggattgatgataagtatttcttagttgcgtgttgcctaattgtatcctgtaaattacactttcccagtagttattttaaaagaaaaattatgttttgctgtttacaggaactgacacaggtatatgatcaagtgttaagtctcaggcacgttcttgtagctccgcataaataactttcctttctttagttatgcc

SEQ ID NO: 94682 - DNA, 599 bp, Chicken  19866894563898_1
  misc_feature (1)..(118): n is any nucleotide
nnnnnnnnnnnnnnnnnnnnnnnnnnnnnnnnnnnnnnnnnnnnnnnnnnnnnnnnnnnnnnnnnnnnnnnnnnnnnnnnnnnnnnnnnnnnnnnnnnnnnnnnnnnnnnnnnnnnnnacagaaatgactcccctgccttctgtcatggtttggccccattctgtgactaacagggtggagggaaccactgaccctgctctgagatggggggagaggggtagggaaaaggtagggagatgagcctaaaaacaaaacagcagcaacaagctaaggggcaaaatcaattttctaaatgtgayagtagaatgcaagataaggcaatataatactgtaaaatttgaattgaagcttataaataaaatgaaagagtgtccaaaactgaaggcattactctaatgctgaaggtgagagggagcacacactgcagagatgagcagaagaaagggggctgtgtygtgactagtgagcagttttatctttccctctgaacagagaacagaaatgaaacagtgaagtcttcagagatttgtagttcttctcctctgagaaagatatcctggaactatcagcaatccacagaactggagcattaactctt

SEQ ID NO: 94683 - DNA, 600 bp, Chicken  19866894563898_2
ccattctgtgactaacagggtggagggaaccactgaccctgctctgagatggggggagaggggtagggaaaaggtagggagatgagcctaaaaacaaaacagcagcaacaagctaaggggcaaaatcaattttctaaatgtgayagtagaatgcaagataaggcaatataatactgtaaaatttgaattgaagcttataaataaaatgaaagagtgtccaaaactgaaggcattactctaatgctgaaggtgagagggagcacacactgcagagatgagcagaagaaagggggctgtgtygtgactagtgagcagttttatctttccctctgaacagagaacagaaatgaaacagtgaagtcttcagagatttgtagttcttctcctctgagaaagatatcctggaactatcagcaatccacagaactggagcattaactcttcaactcccagtgcaatgcatgatgcagtgatgtggaataccagtaacaaaaatcataaaaccattatacaacttcataattcaaacagagtaaaaatataaataaataagggtgggagaggaacttaaccttagatattctgagaaacagtaccaat

SEQ ID NO: 94684 - DNA, 600 bp, Chicken  19866894563900_1
aggtggtagcagggctgctaactttagcatttttcatacagctttgaaaaataacacatttttcacttgttagtgagatataggatttgaggcagaaatatggataaaatattatataaatacaccttaaaaaccttttttgagattttaggctacaattcttaaaactcaaaggcttttacacatacagacatattactgtttacaaatgattcatgcaaggtcagatacttcgcttaagatatcatgtttcctgtccataagaaaatcctataccaattatagaaccacaaattaaartcatctaamtctgtcacagctgcmtgttgctagaaagtagctgggattctagtactgcttattggtacsttctgagtgttgcctatcatgtagtgtggggacttgcattacttctaaggaaggcwgtttgcagtccatgtgtcttcctactgactaactggaacagggttatttatacttgatttttgttttgaacacaacttggtaatcaagcttttgttgatattaatactctttaattgttgttttcatacttaacgaacaagcagtagatggtctaagcagtatcattcagatgta

SEQ ID NO: 94685 - DNA, 600 bp, Chicken  19866894563900_2
cagggctgctaactttagcatttttcatacagctttgaaaaataacacatttttcacttgttagtgagatataggatttgaggcagaaatatggataaaatattatataaatacaccttaaaaaccttttttgagattttaggctacaattcttaaaactcaaaggcttttacacatacagacatattactgtttacaaatgattcatgcaaggtcagatacttcgcttaagatatcatgtttcctgtccataagaaaatcctataccaattatagaaccacaaattaaartcatctaamtctgtcacagctgcmtgttgctagaaagtagctgggattctagtactgcttattggtacsttctgagtgttgcctatcatgtagtgtggggacttgcattacttctaaggaaggcwgtttgcagtccatgtgtcttcctactgactaactggaacagggttatttatacttgatttttgttttgaacacaacttggtaatcaagcttttgttgatattaatactctttaattgttgttttcatacttaacgaacaagcagtagatggtctaagcagtatcattcagatgtaagaattgga

SEQ ID NO: 94686 - DNA, 600 bp, Chicken  19866894563900_3
tagcatttttcatacagctttgaaaaataacacatttttcacttgttagtgagatataggatttgaggcagaaatatggataaaatattatataaatacaccttaaaaaccttttttgagattttaggctacaattcttaaaactcaaaggcttttacacatacagacatattactgtttacaaatgattcatgcaaggtcagatacttcgcttaagatatcatgtttcctgtccataagaaaatcctataccaattatagaaccacaaattaaartcatctaamtctgtcacagctgcmtgttgctagaaagtagctgggattctagtactgcttattggtacsttctgagtgttgcctatcatgtagtgtggggacttgcattacttctaaggaaggcwgtttgcagtccatgtgtcttcctactgactaactggaacagggttatttatacttgatttttgttttgaacacaacttggtaatcaagcttttgttgatattaatactctttaattgttgttttcatacttaacgaacaagcagtagatggtctaagcagtatcattcagatgtaagaattggattatgatatacagca

SEQ ID NO: 94687 - DNA, 600 bp, Chicken  19866894563900_4
ttagtgagatataggatttgaggcagaaatatggataaaatattatataaatacaccttaaaaaccttttttgagattttaggctacaattcttaaaactcaaaggcttttacacatacagacatattactgtttacaaatgattcatgcaaggtcagatacttcgcttaagatatcatgtttcctgtccataagaaaatcctataccaattatagaaccacaaattaaartcatctaamtctgtcacagctgcmtgttgctagaaagtagctgggattctagtactgcttattggtacsttctgagtgttgcctatcatgtagtgtggggacttgcattacttctaaggaaggcwgtttgcagtccatgtgtcttcctactgactaactggaacagggttatttatacttgatttttgttttgaacacaacttggtaatcaagcttttgttgatattaatactctttaattgttgttttcatacttaacgaacaagcagtagatggtctaagcagtatcattcagatgtaagaattggattatgatatacagcatctgtttggggatataaaactctgaagactgtggatctaagattc

SEQ ID NO: 94688 - DNA, 567 bp, Chicken  19866894563900_5
cttaaaaaccttttttgagattttaggctacaattcttaaaactcaaaggcttttacacatacagacatattactgtttacaaatgattcatgcaaggtcagatacttcgcttaagatatcatgtttcctgtccataagaaaatcctataccaattatagaaccacaaattaaartcatctaamtctgtcacagctgcmtgttgctagaaagtagctgggattctagtactgcttattggtacsttctgagtgttgcctatcatgtagtgtggggacttgcattacttctaaggaaggcwgtttgcagtccatgtgtcttcctactgactaactggaacagggttatttatacttgatttttgttttgaacacaacttggtaatcaagcttttgttgatattaatactctttaattgttgttttcatacttaacgaacaagcagtagatggtctaagcagtatcattcagatgtaagaattggattatgatatacagcatctgtttggggatataaaactctgaagactgtggatctaagattccatttagattgctagtaaagatt

SEQ ID NO: 94689 - DNA, 421 bp, Chicken  19866894563908_1
attcattggcagcactgaagtttctgttcatcatctctgccttttctttccttcccattccccacgtttcgcttggtgcggcccttagcaagaactgattcagctcattggttgcacagaaaaagaacccagcagagcaagaatcccacttctgtcatgttaggaggtcagtttggcttatggaaacaggcagggcatagagcatatggcaggtggagggcaaggaggcaggacttctcttcacccagcactgctttggttgctcagcgcttatgggaatggttgagttttcagtgtgtytctctcactgtggaatctcaatcttcgttcaccttctatttgtatgcctttgtacagtaataagtttgcttaattcagcaaatgtatgtaggtcattattagcttctcatgtcagaaagcg

SEQ ID NO: 94690 - DNA, 600 bp, Chicken  19866894563936_1
tcctacctaccatcttgacctataattaagaaaagcatattttggcatggcttctttctacctgtaactttttcaacacaacttagagaacataaaggagctccaaatgcacaaggaattatctcttactcaacaccatgtgctttatgtcctttttggtttcttttcctacctttcttaaatgtacagctactttaatcacatatactccatatgctttttagaatagtacagagggaatgccttgcagcttcaggtctttaacttctagacataactacctcccacctttcacttagyttctaatgatctgtactcccaaacatactattttgctttattgkgctgcatcagttaattactttttaagtgcaaaaattctgagctgacatagaagcattcttaccaggtgccagtttctaaagacagagagacttagaagacaagcataccaactcgtcttccttggattctttacctcagactcccggcaggacatgaattttagtacaacatgtttaaggtactcaaagtttatctcccttgagtcatttaaatccgagttgtttgtgacagtcacagaagcattaggcacttcag

SEQ ID NO: 94691 - DNA, 600 bp, Chicken  19866894563936_2
gcatggcttctttctacctgtaactttttcaacacaacttagagaacataaaggagctccaaatgcacaaggaattatctcttactcaacaccatgtgctttatgtcctttttggtttcttttcctacctttcttaaatgtacagctactttaatcacatatactccatatgctttttagaatagtacagagggaatgccttgcagcttcaggtctttaacttctagacataactacctcccacctttcacttagyttctaatgatctgtactcccaaacatactattttgctttattgkgctgcatcagttaattactttttaagtgcaaaaattctgagctgacatagaagcattcttaccaggtgccagtttctaaagacagagagacttagaagacaagcataccaactcgtcttccttggattctttacctcagactcccggcaggacatgaattttagtacaacatgtttaaggtactcaaagtttatctcccttgagtcatttaaatccgagttgtttgtgacagtcacagaagcattaggcacttcagaatttgttttttcacgtagttcaggtacttcactgtccggcctt

SEQ ID NO: 94692 - DNA, 461 bp, Chicken  19866894563940_1
tcagcaatggcatgaagttcaacaaagagaaatgctgggtactgcacctgggatggagtaaatgccagacagacgcagactgggagatgagtggctgggaagtagctcagcagggagggacgctcatgacagcagctcagtgtgaggaagcagtgtgccctcgcagccaagacagcattttggggtgcattaaatacagcagagccagctggtcaaaagaggtgattttctgctgcgcaatacaaaaaggatgttaaagcccttgaaagcatccagaggagggcagcaaagctggcaacrgggctgaaggcatgtcctgtgaggaggggctgaagattcttggtttgtgagctatgtaggggatgatgcatttgtcgaaggttcaaacagactaacgtcaatcatgaagcaatggggaggagagctgtaacagcagtgtgtacagaaatgctttagtgagt

SEQ ID NO: 94693 - DNA, 600 bp, Chicken  19866894563954_1
gaattatatcactatttctgtgtttcaaagagagagaataaacaaaacaatttcctctggattctgttagttggagagaacaaagtcattctcctaaatcttgaagcggtgcctcatatcccatgtcagctcaacaaatttgactgctaacttttcacatgtggtcttgatcctccttatctagaagtaagatgtggacctttcatgataaagaagtatctttcaaacttacaaccaatgcataatgacaagacttgagtgtgctgaattaatattcagacaaggtgttaaccatatgtkggggagtaatgcaaatttcatcaataaaatacaatgcaaaccatagaatacataaaataacccatgttgaaaagggcccacaaggatcacttggtccagctctgggatccaaacaggaccactcaaaaattacaccaatacaatgcaataacaacaaaatttaaataatatttaataagaagaggaacctgctacatgtttgtatcagaaaggggactttattttagtcttccatgtgttaaatggacgcctaaagaaagtagttagggcctycaaattcttcgcagcaggacaatggga

SEQ ID NO: 94694 - DNA, 600 bp, Chicken  19866894563954_2
attcagacaaggtgttaaccatatgtkggggagtaatgcaaatttcatcaataaaatacaatgcaaaccatagaatacataaaataacccatgttgaaaagggcccacaaggatcacttggtccagctctgggatccaaacaggaccactcaaaaattacaccaatacaatgcaataacaacaaaatttaaataatatttaataagaagaggaacctgctacatgtttgtatcagaaaggggactttattttagtcttccatgtgttaaatggacgcctaaagaaagtagttagggcctycaaattcttcgcagcaggacaatgggaaatacaggaacactactttggactaaatgaacctaccaaagatgtacaagtttggagagaaaatgtggtcctcagcaagatggtcctcagcgggatgacccatctccagctgcactcacacagggaagcaaaagcaagcagaaaatcttcctttcctaatgattttgcacagaccaaagagcttctttcaacctcaaaaaattctgggaaatcacctgccacaaaagtccagccatcaagaagtcactaactctctttttcagaaaaagaaat

SEQ ID NO: 94695 - DNA, 600 bp, Chicken  19866894563986_1
ccacgtgctagcttgcaactaatgtgaaacagaatcatagaaatatttaagttggaaaggatccctaaaggccatcaggtccaacttctgtgcaatgaacacggacacctacagtgagatcaggtgttcagagtcccacccagcctgaccttgggtgtctccaggaatggggcttggtctaccatttttctgggcaacctgcgctaatgcctcaccactgttattgtaaaagcttccttccttatatccaagaagttctttacaataaaggtagtgatgtaggatggctgtggaaatggycctggcctgtgccggtgcattacaccatgcagtgggaccctgccaggttcttcacagcagtaatactgacagcactgaattctctgaattttaagtcatttgtcccaagatgctgttcttctccaggttcttttgcataatgaaacattctctttttattaatagaattaaatattcaaactgggccaaagtcttaatgaaagttgagatgtctcagctattgcccacacaagaataacataataacaggcattacaattttacacagttgtaaatccaaatgaatatcactatcactgg

SEQ ID NO: 94696 - DNA, 600 bp, Chicken  19866894563990_1
gaaggacagttttgtgccagtggttttcagcctcactggtgcagatttctctgccttcatggggtccaggaggcagtggagaaccaatggcctacccatgagcagtgttaagagtcatacaatcattaaattcactaattgaaacacatggaatcttcagtatttctttgaacacggtgttcaagctcagccaggcctgtgacctttaactagtgctttgctattaattggggtgactgaggtcactcagatgacttggacttcttcctttggtgttacaaggaattcaggctgtggaasagtctacttgcttttgacagaaatggtttgccagctggctgtgtgaaagggctcttaatatagctggagtctcattctaaaatgtgctacttcagccctgacgtgttggagtctatggaggaaatacttggtggatattttttttccttttgcctaaatgattcagtggttttagagaagaggaatcattgtattaaataataataaaacaaatgcaatactacgaactactttaaaaatacatcacagttagtgcatgcttttctactcagaactcattagaacaagaactaagcacat

SEQ ID NO: 94697 - DNA, 600 bp, Chicken  19866894564003_1
atactcctggacaacatttacttctcagcctccttggtactcacctgccaactcatatgatatcaaatggtttggaataactgttctcataataatagatacaagtctttgtggagttctaaactaaatagcagcaggtagatgtgaattagtaacaatgtacttaaccagggatgtgcaaaagggagtgtgatttaagaatcattgctttaaaagaatggctagaagatttccttcagcaattttgatatacacttacagtttctttttaggtgaaaacagaactacagagtagtttcragtttcrtctgactgagagtaaatttatacatcggaggtggtcactatagacttcctttatgtaattaatggagagaaattacccttcccagagagcaattgatgacatccttaattggttgtgtacagtgtaggttatctgaatgtcatccttaaatgatattgcctataaaggaaacctgtatctgctagtataggtatagtgacattttactgtggtggtataaaggcaaagagagacagggtgagactttttaagagagatgatccctttcattagaccaatcagtgttgttgatt

SEQ ID NO: 94698 - DNA, 600 bp, Chicken  19866894564003_2
tggacaacatttacttctcagcctccttggtactcacctgccaactcatatgatatcaaatggtttggaataactgttctcataataatagatacaagtctttgtggagttctaaactaaatagcagcaggtagatgtgaattagtaacaatgtacttaaccagggatgtgcaaaagggagtgtgatttaagaatcattgctttaaaagaatggctagaagatttccttcagcaattttgatatacacttacagtttctttttaggtgaaaacagaactacagagtagtttcragtttcrtctgactgagagtaaatttatacatcggaggtggtcactatagacttcctttatgtaattaatggagagaaattacccttcccagagagcaattgatgacatccttaattggttgtgtacagtgtaggttatctgaatgtcatccttaaatgatattgcctataaaggaaacctgtatctgctagtataggtatagtgacattttactgtggtggtataaaggcaaagagagacagggtgagactttttaagagagatgatccctttcattagaccaatcagtgttgttgattagttaca

SEQ ID NO: 94699 - DNA, 476 bp, Chicken  19866894564012_1
atctttttgtatttttgccacaagaactgtaacaaagggctgaactccacaacaaggaggaaaacagactcctctctttctgtgtctgttggtgttgcagaggtgtgaaccatggcccaatcccagccgtccaacaaggttatggatcgacactgcacagcagtccctatccatacagctgttctgtgtgttagaaatattcctgcgctgcccatcactacagccagggtcatagagggacgaggcaaaaagccaaagtgagctgtcagccactgcttgcatccataaccactgggcackgtatccaaacaagtgcttcagaacaactgcttttcagggaacataaaatcccactggtaataacaaagcatgttgatggattggcactgtataaaagagcacagaaacagcttcaaatgctgtatcagtgcagggtaaggactctacatcacaaattcagacccataagcctctat

SEQ ID NO: 94700 - DNA, 600 bp, Chicken  19866894564015_1
tgtgggtaaatttgaaactgttaatgaaaatgagatttgcatttatctcaaagcataatgtagaagtaatcaaatatactttcaaagtaatgttaaagactccagtaaaatgccctggggtttactaaaggaaaagaagaaaaaacacagtcactaacacgactcaaggatcattttttcagaggacaaaagtatcttctttactgtaagaggagaatttaggttacctggacagcaagttgagcttcagagctatgtctgtaatacttactaaaacatatttatacagataagtacacrtgcatatactcgcacacaccctgtttgctcttaacaagaaaacaagaactgtcttaattcagaaaagagtgactgtatgttcacaggggagagggtgtgtcttttgacttggagcagcaaatgctcagtttattagccttgctcacttttccctattcrgtttaaattcagagctaagcaaatttccaggagcagtcctgcaattccagctctgtgtgctaatcaatttgctgcagcctgggaagccctgagcacaaactggaatagcccctagctttcatggcttgcctttgcacttcc

SEQ ID NO: 94701 - DNA, 600 bp, Chicken  19866894564015_2
cgactcaaggatcattttttcagaggacaaaagtatcttctttactgtaagaggagaatttaggttacctggacagcaagttgagcttcagagctatgtctgtaatacttactaaaacatatttatacagataagtacacrtgcatatactcgcacacaccctgtttgctcttaacaagaaaacaagaactgtcttaattcagaaaagagtgactgtatgttcacaggggagagggtgtgtcttttgacttggagcagcaaatgctcagtttattagccttgctcacttttccctattcrgtttaaattcagagctaagcaaatttccaggagcagtcctgcaattccagctctgtgtgctaatcaatttgctgcagcctgggaagccctgagcacaaactggaatagcccctagctttcatggcttgcctttgcacttcctcacatatgcaagcctaccttagccaattctgaaaatctgaatggattgggtccagctttttttcttctaaactcttttggacatgcatttattacctttctgtgccaatatctttcatcacccttggcagacctgggggtggatggaagctgttatcc

SEQ ID NO: 94702 - DNA, 600 bp, Chicken  19866894564041_1
atagtttccatcaattcttcttgtttgctccttgcttttcccacaggccatgacactctatgtggcacatttttcaactacatttttaaaaacttagatgtgtgtcttaaagctggccagaatgtctgtgccatccacagtcataaaccacattttctgtcatttctttttgccttcctttttctttctttatttctttctctttttactaacctttgattgtcttttttttttcccttctctgtgaattttatgtgcattttctcttcttcctccctcctatccttcccctgttcttaygttttagatcttctgctcactctaccttgacagtaattgcaaggcaaaatgaaacatggagtatgcaaagtactgtgcatgccaaatctttgcaatttgctgtttttgactccttccattcactcctttttctgtttatattgcaagtttctaacttgctacacaattataataacctcatcagtgcattgccatcagttctctgtttaattagtgagaacctccacaagttgcctggtagcacaaggcactgggactgcaggaagcaaagcttcttggcagaaggaattcccaatttct

SEQ ID NO: 94703 - DNA, 600 bp, Chicken  19866894564042_1
agggtcatgggctagactacacggcatgtgaggagaagctaaggaaataggagttacttagcctggaaaagtctgagaggggacatcatcattgtctacaattgactaatcagaagaaacagagaggtcagaaccatcaggtgcacaagaggcatcagacaccatgagaattgtactgtgattcaaatgaagatgagctcttagattttgagcactcatagaaaattaatttttcacaaatgtcaattttttttgtcaaggcaaaaatagtactgtattttaaatgaactgtcttatatkttttattttctattttgtctattaggttaaaagtattctaatttacatctgtatttattttcccacaagaattttcacttatgtggattaatattcaacatcattttctagaagtatacagtaacttcaatttacaagaaacaytgcataaatgctgaatcacatttcctgaatataatgaaaaaacaagctatcrtttaaataactacatttgaagaagagaggaaataatagaggaataacaggaaattctgcagtgatccttttaaaactctacataatatcccgtatcacttggaa

SEQ ID NO: 94704 - DNA, 531 bp, Chicken  19866894564042_2
acaagaggcatcagacaccatgagaattgtactgtgattcaaatgaagatgagctcttagattttgagcactcatagaaaattaatttttcacaaatgtcaattttttttgtcaaggcaaaaatagtactgtattttaaatgaactgtcttatatkttttattttctattttgtctattaggttaaaagtattctaatttacatctgtatttattttcccacaagaattttcacttatgtggattaatattcaacatcattttctagaagtatacagtaacttcaatttacaagaaacaytgcataaatgctgaatcacatttcctgaatataatgaaaaaacaagctatcrtttaaataactacatttgaagaagagaggaaataatagaggaataacaggaaattctgcagtgatccttttaaaactctacataatatcccgtatcacttggaatctaacttataatgaatgaagttacttcgtgttattcatcactgaaaattcaagagggctatgtttgcttcttct

SEQ ID NO: 94705 - DNA, 479 bp, Chicken  19866894564042_3
gctcttagattttgagcactcatagaaaattaatttttcacaaatgtcaattttttttgtcaaggcaaaaatagtactgtattttaaatgaactgtcttatatkttttattttctattttgtctattaggttaaaagtattctaatttacatctgtatttattttcccacaagaattttcacttatgtggattaatattcaacatcattttctagaagtatacagtaacttcaatttacaagaaacaytgcataaatgctgaatcacatttcctgaatataatgaaaaaacaagctatcrtttaaataactacatttgaagaagagaggaaataatagaggaataacaggaaattctgcagtgatccttttaaaactctacataatatcccgtatcacttggaatctaacttataatgaatgaagttacttcgtgttattcatcactgaaaattcaagagggctatgtttgcttcttct

SEQ ID NO: 94706 - DNA, 600 bp, Chicken  19866894564046_1
ccccaggattgaatgaaagccatacagtaaatggtggaagctggaatgagaagcctgtaaaaatctcctcacagattggtgtaggagaggaaaagtggactcctgtttcctcagctacagctgggaagaggaagactgagacatctgcctgggcccaagatgctgcagatgctaatgggaatggaaaggactggggtgtatcccttgtgagcaggccctggaaagagcgttctttgttcactcccattggtaagctgttctgagtaaaatttgcatcacttaaatgttcttatataattkctagtaatgaatttcttgaatagctttatgcctctatattagaataataattgaatggtctagtgaaatgtgaactaagcattttctatttcttgtaagttctgatggtttatcatctgtgtttctgattgcagcttaactgggctttatctgaaataagattatttctttgtaggaaccaactttcatatcattttcctaaaattctgaaattgcatagttgtagtggaatataactttttttttaatatatttcttagagcattgatatgttctgttgctataacgcaatcaaaccag

SEQ ID NO: 94707 - DNA, 600 bp, Chicken  19866894564052_1
cctcttcccctgcaccagaactggggcttgtgtcccctggtgagcaagtttctatcactaactgaggaaaaatccaattgatatatatttttttcttagctagtttagtgtaaatcacaaaatctctttaacagggtgagaagctgattgcaaatgctgtctgcttgtctctgttccttcacccctcctcagctgtgctagcatagacatgtttgcatccatgctttgaaccacctcaggggattggcagtggttaaaaatagcctagtcaaaactggctgttatgattctggatcagtwgtcctcatggtgacaaaaacaattgcactgagatgcctgaaggcaaaatgtcagcagcagctgagtggttgggagagaggaaggagaaaagagcacggaccacttaggctgccagggctgcatcaaatggatgtcaagtctgctcacacatccacacatagctggtacagattcacatcctagctcagggtgtgcttttctccctatgcgtatgaaaccttagctactatgataataaagtttcaatgatgaagctgttgcaaagcacttgaaaggctcagctgttgcttagtgcatctg

SEQ ID NO: 94708 - DNA, 600 bp, Chicken  19866894564054_1
aaagaactgctgattatattacatgtcatttgctaagtaattccgaacatggcctagtgcttctaaaaaaacctgtataaaatgagtattttttacatctcaggcacatggatacaaatctgagctattttatatatacagacatttacattacatgaaaatctgagtggagatcaaatgaaaaataaaagcttttataaaaagtaccccaaacagcagagatgaaatgtgacaatacaatgcattctcacaacagaggagtaaaaggcacaaatactaaaatgtataaccatgcaaaaratgtacgtccgacctgtgcaacaaagcaaaacaaacggctcccacaagtggttttacagtaattctcagcayatcacagtattgaaacatactgtaagtgcaacatttactgccccgcagcacagtgaagtgttcacaccataccaaattctcccttcccatttcctttctccaaagccaggataatttagctaaggataaagtattaaatcaaatggagctgacgttggctggtgtaacacaatcaatgctccagctgtctgggtggaagagtaagtgcagcccttctgcatccactac

SEQ ID NO: 94709 - DNA, 573 bp, Chicken  19866894564054_2
ctgtataaaatgagtattttttacatctcaggcacatggatacaaatctgagctattttatatatacagacatttacattacatgaaaatctgagtggagatcaaatgaaaaataaaagcttttataaaaagtaccccaaacagcagagatgaaatgtgacaatacaatgcattctcacaacagaggagtaaaaggcacaaatactaaaatgtataaccatgcaaaaratgtacgtccgacctgtgcaacaaagcaaaacaaacggctcccacaagtggttttacagtaattctcagcayatcacagtattgaaacatactgtaagtgcaacatttactgccccgcagcacagtgaagtgttcacaccataccaaattctcccttcccatttcctttctccaaagccaggataatttagctaaggataaagtattaaatcaaatggagctgacgttggctggtgtaacacaatcaatgctccagctgtctgggtggaagagtaagtgcagcccttctgcatccactacttactgcatattgaacgcgtgtctaccagagcaaccccttccctg

SEQ ID NO: 94710 - DNA, 599 bp, Chicken  19866894564058_1
  misc_feature (1)..(109): n is any nucleotide
nnnnnnnnnnnnnnnnnnnnnnnnnnnnnnnnnnnnnnnnnnnnnnnnnnnnnnnnnnnnnnnnnnnnnnnnnnnnnnnnnnnnnnnnnnnnnnnnnnnnnnnnnnnnntgggacacagagtgctctgacacagaaaggagctgccccacagcccaaggatacctgagcacaccttcctgcacgccaccccaaagcacaactggaaggcgtcttctgggggaagccgggtttggggttcaaagccctggatgacaccacactgctggcagaccaacatccttccagataccccggttgtyatcscaccatggcttaaaccacaccagctgccacatccctctggcttcagcaacctcactgagatctgaatccaatgggaaacgtttcacacactggggtaaaaaggagagctgggcgtccccagccagacacagacaccacgctccccaccttctctgcaaccaacaccaccctccccagctgcagcacagcatccttccagacaggagttagagagaaagagctgcatcggtttcctgaggttaaaaaaataaaataaatcaatgatctgctctaacgaccatttcgcatgcttaaa

SEQ ID NO: 94711 - DNA, 599 bp, Chicken  19866894564058_2
  misc_feature (1)..(105): n is any nucleotide
nnnnnnnnnnnnnnnnnnnnnnnnnnnnnnnnnnnnnnnnnnnnnnnnnnnnnnnnnnnnnnnnnnnnnnnnnnnnnnnnnnnnnnnnnnnnnnnnnnnnnnnnntgggacacagagtgctctgacacagaaaggagctgccccacagcccaaggatacctgagcacaccttcctgcacgccaccccaaagcacaactggaaggcgtcttctgggggaagccgggtttggggttcaaagccctggatgacaccacactgctggcagaccaacatccttccagataccccggttgtyatcscaccatggcttaaaccacaccagctgccacatccctctggcttcagcaacctcactgagatctgaatccaatgggaaacgtttcacacactggggtaaaaaggagagctgggcgtccccagccagacacagacaccacgctccccaccttctctgcaaccaacaccaccctccccagctgcagcacagcatccttccagacaggagttagagagaaagagctgcatcggtttcctgaggttaaaaaaataaaataaatcaatgatctgctctaacgaccatttcgcatgcttaaaagcg

SEQ ID NO: 94712 - DNA, 600 bp, Chicken  19866894564064_1
ttcagtaaaatcagtctctaacttggtgcattagactgatccttttatctaacctctgtatttgaattcctcaaaaatcttttattttttttgtttgaaatgacaggagtgtgaatgatttaaaaggtgaaactatagccaaatgctggccttttctgaataaataattgcttctggtggaaccgtgcaaaggagttaaagtagagattgaggaggaactgaatggttttggagttctaagttgtaagaaaagaagggatgttacacttttgcattcatttacctgtccctgtataaccmtaacacagagatcttgcaaagtatttcacaatatatgcttgtctttagatccaagtctctggcacaggctatggttttatatagaatgtttactccccaaaggcatgattctactacttcccttgtcatggatgtggtcgcttttcagtctcaatctgagtcacttcaattagctgrtttagtggaaaacaaatcctacaagattttttttctttgtctcaaccagattaatcattcagctgttctgcagatcttgcatggaacaggtagaattgctttttagttgtttttcagcagcag

SEQ ID NO: 94713 - DNA, 600 bp, Chicken  19866894564064_2
tggaaccgtgcaaaggagttaaagtagagattgaggaggaactgaatggttttggagttctaagttgtaagaaaagaagggatgttacacttttgcattcatttacctgtccctgtataaccmtaacacagagatcttgcaaagtatttcacaatatatgcttgtctttagatccaagtctctggcacaggctatggttttatatagaatgtttactccccaaaggcatgattctactacttcccttgtcatggatgtggtcgcttttcagtctcaatctgagtcacttcaattagctgrtttagtggaaaacaaatcctacaagattttttttctttgtctcaaccagattaatcattcagctgttctgcagatcttgcatggaacaggtagaattgctttttagttgtttttcagcagcagctactttttagaatctgagtcccccagcagttatttctgagtcatatttagaacacaaaatcagaaataaagcctagtatttctcctggatttctgttttgcttgaaactggtcatgcagtgaaaatatttaagggtgctctcttgtatgttttctctgatacgtaataatgtctga

SEQ ID NO: 94714 - DNA, 600 bp, Chicken  19866894564065_1
gatgtactgataggactttttcttattgccccaagtgtgtctgaattgccacccccaagcaattaaatgtaacagccatatgaattatgctgcaagtgatgggaaagaaaaagaaggttggaaatctgagtctgaatttccaatattcctgatgccttccacaaaattcatttatacaaataataagtacacaagcagtaaacatgattagcaggaactcatccttctgcttttattgatataaaagcctgttcctttatttcaactgtatgctggtatttgtttttctcaccacaaccyagtattcaaaactgcatgataaagtgcctgcttccttcaaaaccgggctagtgggatagtaaaacagctttgctttggttacttttccactgaaaatgacaacaggaactataggtcttaaatattatacacttaacagcagagatgctgtagttcaggttatctggtagctgcagagatcttcacaaagcagaaggtaagaataaaatgaagagaactttttttgctgtaacttttttttcttgattggttatgccatcttctttcaaactttctctggtcctctggttgcttggtttg

SEQ ID NO: 94715 - DNA, 600 bp, Chicken  19866894564082_1
ttttatttaaaatacatatatgcatttattttagcttgtggaaaacgcctggaaattgagaacaaaggaacaaggattgtaggtggaagtgatgccagaagagaggcttggccttggattgtctcacttcattttaattccagacctgtttgtggagcctcccttgtcaatgaggaatggctggtgacagcagcacactgtgtatatgggtaatgttcattgtactcataagttaatgcattctgatgctcttacaacatgcaagcacccacttggtggatatctgtcagtaaagttggrctgaagtataatcttgagccactggtcagtcttctacagagctaatcatcctttcaaaggatcatattgaaatcactggaagaaggtatgttttagaggctttttaaatgttcaaaatgaaattattacagattcataagtacatctttgtctccactgactgcagggcatcctgctgactagctgaaatggtcaaatgacatccataccatgtctttttcatttaaaaaaaagtgaaacacttgctttatgtgcagattgactaaggatgtatcagataatgaataatgtgtgattcta

SEQ ID NO: 94716 - DNA, 599 bp, Chicken  19866894564084_1
  misc_feature (1)..(147): n is any nucleotide
nnnnnnnnnnnnnnnnnnnnnnnnnnnnnnnnnnnnnnnnnnnnnnnnnnnnnnnnnnnnnnnnnnnnnnnnnnnnnnnnnnnnnnnnnnnnnnnnnnnnnnnnnnnnnnnnnnnnnnnnnnnnnnnnnnnnnnnnnnnnnnnnnnnccttactttatttgattctttaaatttccttcacaggcaaaaacttcataaacagtgttattctgtacttgcagaaagatacaaacagctgtccttgtagaagtaccttagtactcatgtaattcacagcccttccttcctttcaagcacatwagagtatttcatgtgtagtgaaggtcaaaacttgcgtttgtagaatcatggaatggattagggctttatgttggaaggaaccttaaagcccatcctgttccaaacctcccactatgctatgttgcgcacagctgcatccagcctggcttgggaacacttccagggatggggcatccacagcttctcagtgcctcactaccctctgagttaagaagtttttcctcatctctgatctttgtcttgccctcatcttaccctcatttagtttaaattcrttattgctttctttcttttttttt

SEQ ID NO: 94717 - DNA, 600 bp, Chicken  19866894564084_2
gcccttccttcctttcaagcacatwagagtatttcatgtgtagtgaaggtcaaaacttgcgtttgtagaatcatggaatggattagggctttatgttggaaggaaccttaaagcccatcctgttccaaacctcccactatgctatgttgcgcacagctgcatccagcctggcttgggaacacttccagggatggggcatccacagcttctcagtgcctcactaccctctgagttaagaagtttttcctcatctctgatctttgtcttgccctcatcttaccctcatttagtttaaattcrttattgctttctttctttttttttctttttttttttcttttttctttttttgctactcccttcatttgtgctataaagaggtctgctggcttgaaatgagaataaaataccaatatgtgttctcttgtttatgtgtacacataaatatatttctatataatgttcctatcttgacactgtcacacagaccagtctgtggaaaagcccagaaaaggtattattatccacattgtcacagttcctattataaatatgaaattgataaaaaaaagttcttgtacaagtttgtgtcagagctag

SEQ ID NO: 94718 - DNA, 599 bp, Chicken  19866894564085_1
  misc_feature (1)..(42): n is any nucleotide
nnnnnnnnnnnnnnnnnnnnnnnnnnnnnnnnnnnnnnnnnncattgtgagcaaaggcaaacgatgcactgcataaagagccaggagacacttctgtgataggtatgagggagaactgagggaggaacaagaacacaggatgaaggcacagacatggaaaaaaagtcatggtttatgtacattatgaggttggattctccagtgtgattcacactgacatacactaaatcagtaagttcctctgcccagtgaggaccctttggatcacagtgcaacagagccaggtctcaaaaacactgytggatttgggacaaagaaagtgattggataaagtcagctttcaagcttctcttacgagaaaggtagtccagtgttgatttaagtaagcaaaaccaaagtcaaacaggactcaaaatggtatgaacctctacattcagattaataaaagcagacaaaaaatctaataagacatgtaacttatgtactaaaattgtccttactcagcacaatatagcaaaatgatgtaatagtacataatttccagttatgtttagataggaaggaaaaaaaaagataaaagtcaatactaattcyaaaca

SEQ ID NO: 94719 - DNA, 600 bp, Chicken  19866894564085_2
cactgytggatttgggacaaagaaagtgattggataaagtcagctttcaagcttctcttacgagaaaggtagtccagtgttgatttaagtaagcaaaaccaaagtcaaacaggactcaaaatggtatgaacctctacattcagattaataaaagcagacaaaaaatctaataagacatgtaacttatgtactaaaattgtccttactcagcacaatatagcaaaatgatgtaatagtacataatttccagttatgtttagataggaaggaaaaaaaaagataaaagtcaatactaattcyaaacacaacacagaagagagcmcactgtaacttactgaatttgggctttttctaagtaggggaaaaaaaaaaggtcaaagtaacatatccaattacaagcatggcaaaatggtttaagccaaattgaagcttcagactaagataccagtattaagcatcccttaactgcgggtgataaatctcatttttacatttcatatccaaggctgggtttataaatcacagatggttcttccagaagcctctctttctttactctgacctgaagatatgttttaaaaatatatctgtccgtaagcc

SEQ ID NO: 94720 - DNA, 591 bp, Chicken  19866894564085_3
aaagtgattggataaagtcagctttcaagcttctcttacgagaaaggtagtccagtgttgatttaagtaagcaaaaccaaagtcaaacaggactcaaaatggtatgaacctctacattcagattaataaaagcagacaaaaaatctaataagacatgtaacttatgtactaaaattgtccttactcagcacaatatagcaaaatgatgtaatagtacataatttccagttatgtttagataggaaggaaaaaaaaagataaaagtcaatactaattcyaaacacaacacagaagagagcmcactgtaacttactgaatttgggctttttctaagtaggggaaaaaaaaaaggtcaaagtaacatatccaattacaagcatggcaaaatggtttaagccaaattgaagcttcagactaagataccagtattaagcatcccttaactgcgggtgataaatctcatttttacatttcatatccaaggctgggtttataaatcacagatggttcttccagaagcctctctttctttactctgacctgaagatatgttttaaaaatatatctgtccgtaagccccccagcagtaga

SEQ ID NO: 94721 - DNA, 600 bp, Chicken  19866894564092_1
ttttagaaacattaacacttcaaagttgtgtttctcctccatggttccagggtttttccctgattgtgatctttcttgtgttgctttttttcccacacaaaagaactttgcatcaatttagcacagaacaaggttgatttgtgctctcctagaacctttataaacaactgtgtgcatcaacagttttacacgtcccactgagttttagacccaaatcatccgctgctggtactgtctgacctttttagcatgtgtggcactctgagggagtacaagaagactgaattttccatcagctcrcaaacagatattgctgatatttgaaagaaagcaataataagcacttagccagctgatttcctagtagcatacatagtgtgtttccaaagcagatcagacttttgttttggtttcagaaaggcttttgttgttattacttacctgcagcagaaattgcatgatgtctgtcctatgggtgtgaatatttataggtttctatattgtacttggcagcattgaattcgaaaccctcaatagagcactagatggaaacttgggatcaatgtacgcaagaagttttttgcttcagacaaaatctac

SEQ ID NO: 94722 - DNA, 599 bp, Chicken  19866894564095_1
  misc_feature (1)..(149): n is any nucleotide
nnnnnnnnnnnnnnnnnnnnnnnnnnnnnnnnnnnnnnnnnnnnnnnnnnnnnnnnnnnnnnnnnnnnnnnnnnnnnnnnnnnnnnnnnnnnnnnnnnnnnnnnnnnnnnnnnnnnnnnnnnnnnnnnnnnnnnnnnnnnnnnnnnnnncaggaatcatgcttcctgcactcaatccagcaaaagtggaggacaggatttggcagggggttgtaagaaataggtttggctccctagtttctgaacctgatattgatgtctattctttacttgaatctgttggtggaggatgcaactgaaygtgcttgtaccagaggctccctcggagagaggcttctggtggcaggatgaagacatcctcaacaaggatgcacctaaggaaactttgacagagaaggcagaatacaataaggatggtcacagaaaccaagggagagcaaaggttcaagaayagcagagcagctgacgggcaggtgtgtggcttttattggcaccttgtcttagcaatggagggctttggtaagggtcatttggattaaatgccaaaggaagcactkgttcagaggccacaactggtactggcaaaaaggracttgaagt

SEQ ID NO: 94723 - DNA, 600 bp, Chicken  19866894564095_2
ggaatcatgcttcctgcactcaatccagcaaaagtggaggacaggatttggcagggggttgtaagaaataggtttggctccctagtttctgaacctgatattgatgtctattctttacttgaatctgttggtggaggatgcaactgaaygtgcttgtaccagaggctccctcggagagaggcttctggtggcaggatgaagacatcctcaacaaggatgcacctaaggaaactttgacagagaaggcagaatacaataaggatggtcacagaaaccaagggagagcaaaggttcaagaayagcagagcagctgacgggcaggtgtgtggcttttattggcaccttgtcttagcaatggagggctttggtaagggtcatttggattaaatgccaaaggaagcactkgttcagaggccacaactggtactggcaaaaaggracttgaagtaaatggctctcagaaggtctgcaattgccataattcagtgtggtgagggggctcaaaagacaaaagggctkagaggagcagtgaaaaggatgtttctgtgcagagtgaggtgaatgaggaggggttatgaactatcaaggcaagcagaagtg

SEQ ID NO: 94724 - DNA, 600 bp, Chicken  19866894564095_3
gtctattctttacttgaatctgttggtggaggatgcaactgaaygtgcttgtaccagaggctccctcggagagaggcttctggtggcaggatgaagacatcctcaacaaggatgcacctaaggaaactttgacagagaaggcagaatacaataaggatggtcacagaaaccaagggagagcaaaggttcaagaayagcagagcagctgacgggcaggtgtgtggcttttattggcaccttgtcttagcaatggagggctttggtaagggtcatttggattaaatgccaaaggaagcactkgttcagaggccacaactggtactggcaaaaaggracttgaagtaaatggctctcagaaggtctgcaattgccataattcagtgtggtgagggggctcaaaagacaaaagggctkagaggagcagtgaaaaggatgtttctgtgcagagtgaggtgaatgaggaggggttatgaactatcaaggcaagcagaagtgctgggaaagaagagcagagatcttccaggtactgtaacaggagaacagaaaggatgtgaggcagccacacactgcaaactctagttcttagattttgtatagttt

SEQ ID NO: 94725 - DNA, 600 bp, Chicken  19866894564095_4
gcaactgaaygtgcttgtaccagaggctccctcggagagaggcttctggtggcaggatgaagacatcctcaacaaggatgcacctaaggaaactttgacagagaaggcagaatacaataaggatggtcacagaaaccaagggagagcaaaggttcaagaayagcagagcagctgacgggcaggtgtgtggcttttattggcaccttgtcttagcaatggagggctttggtaagggtcatttggattaaatgccaaaggaagcactkgttcagaggccacaactggtactggcaaaaaggracttgaagtaaatggctctcagaaggtctgcaattgccataattcagtgtggtgagggggctcaaaagacaaaagggctkagaggagcagtgaaaaggatgtttctgtgcagagtgaggtgaatgaggaggggttatgaactatcaaggcaagcagaagtgctgggaaagaagagcagagatcttccaggtactgtaacaggagaacagaaaggatgtgaggcagccacacactgcaaactctagttcttagattttgtatagtttcctcctgttcatagagtagaagagcatttcagga

SEQ ID NO: 94726 - DNA, 600 bp, Chicken  19866894564095_5
cacctaaggaaactttgacagagaaggcagaatacaataaggatggtcacagaaaccaagggagagcaaaggttcaagaayagcagagcagctgacgggcaggtgtgtggcttttattggcaccttgtcttagcaatggagggctttggtaagggtcatttggattaaatgccaaaggaagcactkgttcagaggccacaactggtactggcaaaaaggracttgaagtaaatggctctcagaaggtctgcaattgccataattcagtgtggtgagggggctcaaaagacaaaagggctkagaggagcagtgaaaaggatgtttctgtgcagagtgaggtgaatgaggaggggttatgaactatcaaggcaagcagaagtgctgggaaagaagagcagagatcttccaggtactgtaacaggagaacagaaaggatgtgaggcagccacacactgcaaactctagttcttagattttgtatagtttcctcctgttcatagagtagaagagcatttcaggaatgaatcagaagtaaaagaggattcatgtacgtaaaagctcttcaggctctgagctgccctgatgaggctaacactgaca

SEQ ID NO: 94727 - DNA, 600 bp, Chicken  19866894564096_1
ggagctccagcccgagcattgcctgatctagtaggggtttacatcctggggctgagtgagttgctgcctcagaacatgcagatttcagtcactggtgtctaatagtgagttcacccccagccttttcttggtaacaatggtgttacacttcctcttttctactcagttcatagtattatttacggtaaaactctgggaactaatagctttgtactttctctgtgtcaaattagatttaaattggatcactgatttcaaatgttattaatggggagctgagaaaaatacgcattccttgakttttttactcctttaaagacaaagctaaaaattcaacttatgttgaatttgcttgatctacggctacttaataattatggcaattggcattctgtctcttttttctgattgtctcaggcaaatctcatgctttgggaaacaaactttataggaatcaagttggtaatgccttattcacayccctctgctgggagagaaatgtcacagagtgggtaggtggctggaccaaccctttataatgagttgatgaaaggaaaagaaagaaagyctatgcatcctaactgattcctctgccttaaa

SEQ ID NO: 94728 - DNA, 600 bp, Chicken  19866894564096_2
tacggtaaaactctgggaactaatagctttgtactttctctgtgtcaaattagatttaaattggatcactgatttcaaatgttattaatggggagctgagaaaaatacgcattccttgatttttttactcctttaaagacaaagctaaaaattcaacttatgttgaatttgcttgatctacggctacttaataattatggcaattggcattctgtctcttttttctgattgtctcaggcaaatctcatgctttgggaaacaaactttataggaatcaagttggtaatgccttattcacayccctctgctgggagagaaatgtcacagagtgggtaggtggctggaccaaccctttataatgagttgatgaaaggaaaagaaagaaagyctatgcatcctaactgattcctctgccttaaacaatgaatgttgtttttcttaagtttatttgactaactttaagtcttgcgaatatgattaatgtgcccaagatcatccaagaggacaaattattcatgcaaattacattcataaatggtattcagagatgtataaagatttctttactttccctaatactctgctgtatttgaaacaata

SEQ ID NO: 94729 - DNA, 600 bp, Chicken  19866894564096_3
tggggagctgagaaaaatacgcattccttgatttttttactcctttaaagacaaagctaaaaattcaacttatgttgaatttgcttgatctacggctacttaataattatggcaattggcattctgtctcttttttctgattgtctcaggcaaatctcatgctttgggaaacaaactttataggaatcaagttggtaatgccttattcacayccctctgctgggagagaaatgtcacagagtgggtaggtggctggaccaaccctttataatgagttgatgaaaggaaaagaaagaaagyctatgcatcctaactgattcctctgccttaaacaatgaatgttgtttttcttaagtttatttgactaactttaagtcttgcgaatatgattaatgtgcccaagatcatccaagaggacaaattattcatgcaaattacattcataaatggtattcagagatgtataaagatttctttactttccctaatactctgctgtatttgaaacaatactttatttttttgtttttaaatcctttctttgcagtgctataagtagcctcatgctaggtaaaataggttaaacagtggaaaaagtgc

SEQ ID NO: 94730 - DNA, 600 bp, Chicken  19866894564098_1
cattaaatattaaattgtataaattatcatatatgcacattgtgctatcttctaaaacagatcccagtaactcattacttatcatagaatggattggattggaagggacctcaaagcccatccagttccaatcccctgccatgggaagggctgccacccaggagatcactctgcccgcttggcaacagtcacttttagattatcctaatttacaaatttatcctctgattcaaaagaaaatgactataaaatacaaaatagatctgtaggggcaaaacacctgattattattgccactayatatayagtgaactccacatgcttttcaagggggaacagaaaaaccaagaacagaggtgaagtttagggtggctacagtaaactytaacataaaactaaagtatattaaataatactggtacaattcttaaaagtactgaaaaasttgaaaaatatatatctgtgttttaaattttaaagggacagagcaacttcaggtaggaaaatacacagcatctgacctctcaaattttacctgccctgtagttctacttcacatgatcctgattgtgctgtgcttttagttcttcaaattgagat

SEQ ID NO: 94731 - DNA, 600 bp, Chicken  19866894564098_2
atattaaattgtataaattatcatatatgcacattgtgctatcttctaaaacagatcccagtaactcattacttatcatagaatggattggattggaagggacctcaaagcccatccagttccaatcccctgccatgggaagggctgccacccaggagatcactctgcccgcttggcaacagtcacttttagattatcctaatttacaaatttatcctctgattcaaaagaaaatgactataaaatacaaaatagatctgtaggggcaaaacacctgattattattgccactayatatayagtgaactccacatgcttttcaagggggaacagaaaaaccaagaacagaggtgaagtttagggtggctacagtaaactytaacataaaactaaagtatattaaataatactggtacaattcttaaaagtactgaaaaasttgaaaaatatatatctgtgttttaaattttaaagggacagagcaacttcaggtaggaaaatacacagcatctgacctctcaaattttacctgccctgtagttctacttcacatgatcctgattgtgctgtgcttttagttcttcaaattgagattaaatt

SEQ ID NO: 94732 - DNA, 600 bp, Chicken  19866894564098_3
agaatggattggattggaagggacctcaaagcccatccagttccaatcccctgccatgggaagggctgccacccaggagatcactctgcccgcttggcaacagtcacttttagattatcctaatttacaaatttatcctctgattcaaaagaaaatgactataaaatacaaaatagatctgtaggggcaaaacacctgattattattgccactayatatayagtgaactccacatgcttttcaagggggaacagaaaaaccaagaacagaggtgaagtttagggtggctacagtaaactytaacataaaactaaagtatattaaataatactggtacaattcttaaaagtactgaaaaasttgaaaaatatatatctgtgttttaaattttaaagggacagagcaacttcaggtaggaaaatacacagcatctgacctctcaaattttacctgccctgtagttctacttcacatgatcctgattgtgctgtgcttttagttcttcaaattgagattaaattgatatttttttttcatccctcctcacaattttcttattcagagcttcctaataacagttgggattggtcttacttccta

SEQ ID NO: 94733 - DNA, 559 bp, Chicken  19866894564098_4
aagggctgccacccaggagatcactctgcccgcttggcaacagtcacttttagattatcctaatttacaaatttatcctctgattcaaaagaaaatgactataaaatacaaaatagatctgtaggggcaaaacacctgattattattgccactayatatayagtgaactccacatgcttttcaagggggaacagaaaaaccaagaacagaggtgaagtttagggtggctacagtaaactytaacataaaactaaagtatattaaataatactggtacaattcttaaaagtactgaaaaasttgaaaaatatatatctgtgttttaaattttaaagggacagagcaacttcaggtaggaaaatacacagcatctgacctctcaaattttacctgccctgtagttctacttcacatgatcctgattgtgctgtgcttttagttcttcaaattgagattaaattgatatttttttttcatccctcctcacaattttcttattcagagcttcctaataacagttgggattggtcttacttcctactaatacacatttttggct

SEQ ID NO: 94734 - DNA, 599 bp, Chicken  19866894564161_1
  misc_feature (1)..(49): n is any nucleotide
nnnnnnnnnnnnnnnnnnnnnnnnnnnnnnnnnnnnnnnnnnnnnnnnnattgagagtacagattaagtaaaaccatggcttccacaaatgaggttaggagtttccacacacagtcaaggaaacttatgctaataattgtatatgctatctgaagtaatgcttagagtttgatcccagccaagataaccaccagagcaaaccaaaatagtgatttgtaccagttaagaattccttggtcttggatcgttcataacttaccttgttagcactaatgcaaggcctgggtgcaaggcccagcrttccatgatttactaaaaagcttttgttccaacctacttcctacagtgtcctcagcattttggtaatgacctgcactctgcctctgcagaaggaagtactcaaaggtgacctctatgagcagagggctgcagcccrggggctccagtgacagaaatcaagtcttggtgcagtgtctttcttaggaaactggttgtgcccaaaaaaatcacggcagtgtgagagccacttaaaaatgggagcggtaaaggcagagctccacttcttctcaaggaagggaagaagctgacattagtcacca

SEQ ID NO: 94735 - DNA, 600 bp, Chicken  19866894564161_2
ttgtatatgctatctgaagtaatgcttagagtttgatcccagccaagataaccaccagagcaaaccaaaatagtgatttgtaccagttaagaattccttggtcttggatcgttcataacttaccttgttagcactaatgcaaggcctgggtgcaaggcccagcrttccatgatttactaaaaagcttttgttccaacctacttcctacagtgtcctcagcattttggtaatgacctgcactctgcctctgcagaaggaagtactcaaaggtgacctctatgagcagagggctgcagcccrggggctccagtgacagaaatcaagtcttggtgcagtgtctttcttaggaaactggttgtgcccaaaaaaatcacggcagtgtgagagccacttaaaaatgggagcggtaaaggcagagctccacttcttctcaaggaagggaagaagctgacattagtcaccagagactccactagctagagagcagctttccggatggatcacgaggaactcagtgaagcaaaacattaggagagcttcttcacccacgtaatgacacctgcttattactcctgcctgccaccatttaactgaaaccac

SEQ ID NO: 94736 - DNA, 600 bp, Chicken  19866894564169_1
gcctccccttccatgggacccctccctttgaggcagtgtggtgctgcgaggggaaagcagcaggaaggctctcattgctgcgctgcggctctggggggagcagctgtctgggctgtgcaggtcctgctgcctcctgcgtgttctgcactgcgctcacagcactgcatgctctgccccacctctgtgtgaccacctcgctttctttccacgtgttcctaggagctggagaagctcgggctgcgagatggcgtggacctgcatgtctatgaagtcccggtggaataccagacggtgcagagrctcatccctgcactgtggaagaagcacagtccacaagtgagtgagagaagggaggagaagagatggagccaacgcacggccattgagcaccgtgcagcaccgtgctttgagctgcattcagtgctgcgtcctccgctgcatcctttcctctttcctcatgagaacacckggatttgcagcattctgtggctcagagtgcagtgctgcacttaatgggagctcagcatgcagggctgtgtgggcagctccgctccgtgccacagktgggccataattaattagagctgaggctgagggggg

SEQ ID NO: 94737 - DNA, 600 bp, Chicken  19866894564169_2
tctgccccacctctgtgtgaccacctcgctttctttccacgtgttcctaggagctggagaagctcgggctgcgagatggcgtggacctgcatgtctatgaagtcccggtggaataccagacggtgcagagrctcatccctgcactgtggaagaagcacagtccacaagtgagtgagagaagggaggagaagagatggagccaacgcacggccattgagcaccgtgcagcaccgtgctttgagctgcattcagtgctgcgtcctccgctgcatcctttcctctttcctcatgagaacacckggatttgcagcattctgtggctcagagtgcagtgctgcacttaatgggagctcagcatgcagggctgtgtgggcagctccgctccgtgccacagktgggccataattaattagagctgaggctgagggggggggatggggacgaaacgagaatcgttttgtgctgttggttgctgcaatggctgattgtgtgatggtcatgcaggaattcaggtggaggctctgctggtgcttactgggaactgtgggctgttggttgtccgccggcgtgcgctggttgatgtaacgtgtttcttttctc

SEQ ID NO: 94738 - DNA, 600 bp, Chicken  19866894564169_3
tatgaagtcccggtggaataccagacggtgcagagrctcatccctgcactgtggaagaagcacagtccacaagtgagtgagagaagggaggagaagagatggagccaacgcacggccattgagcaccgtgcagcaccgtgctttgagctgcattcagtgctgcgtcctccgctgcatcctttcctctttcctcatgagaacacckggatttgcagcattctgtggctcagagtgcagtgctgcacttaatgggagctcagcatgcagggctgtgtgggcagctccgctccgtgccacagktgggccataattaattagagctgaggctgagggggggggatggggacgaaacgagaatcgttttgtgctgttggttgctgcaatggctgattgtgtgatggtcatgcaggaattcaggtggaggctctgctggtgcttactgggaactgtgggctgttggttgtccgccggcgtgcgctggttgatgtaacgtgtttcttttctctcgtagttggtggtgcatgtaggtgtgtcgggtatggctaccactgtcactctggagaagtgtggccataatgtgggttataagggcttagacaa

SEQ ID NO: 94739 - DNA, 600 bp, Chicken  19866894564171_1
tagtactccttgaagaagtgtctagaagttggtagaatgagtaagaggaacaatgactgagctgtcaatcactttagaaaataagtgcatttatgttcggtctttttttttcttatataaccttgtaggttcctctttcatcagagaattttattgataagaaaaggtttacagtaggcgaggttaccagaagacacgcagagtgtcaggagcgaaggcagcagggctggaggctgccaatgtaccatctcccccctctgcaaaaggaaaaccctggaaccacacagcactgtggtcccrgaggaatggcagatggccacgcacatctcagaaatctttggcaatgggggattggtaattctcatgcttggaaygatggaaattgtcactctccattgagaaagaaatgaagcaaattagccttctttcagaaggaaacaagcactgagaagggatctcaaccatgcatagaacacttctactcctgagtcaagaaggccctgcttactaagcagtatccccttcagagaaaggaagaaggcagacataaatgaataaaaaaatgtgtgtgcctcctataaatctgagattgcaagtcac

SEQ ID NO: 94740 - DNA, 600 bp, Chicken  19866894564171_2
tagaaaataagtgcatttatgttcggtctttttttttcttatataaccttgtaggttcctctttcatcagagaattttattgataagaaaaggtttacagtaggcgaggttaccagaagacacgcagagtgtcaggagcgaaggcagcagggctggaggctgccaatgtaccatctcccccctctgcaaaaggaaaaccctggaaccacacagcactgtggtcccrgaggaatggcagatggccacgcacatctcagaaatctttggcaatgggggattggtaattctcatgcttggaaygatggaaattgtcactctccattgagaaagaaatgaagcaaattagccttctttcagaaggaaacaagcactgagaagggatctcaaccatgcatagaacacttctactcctgagtcaagaaggccctgcttactaagcagtatccccttcagagaaaggaagaaggcagacataaatgaataaaaaaatgtgtgtgcctcctataaatctgagattgcaagtcactggtctcagccttttgccctaaattttattttattatagtggtagatacagaccatacataaaatgaagtaaaa

SEQ ID NO: 94741 - DNA, 572 bp, Chicken  19866894564187_1
caaaggtcttggggagatggattgaggttcactaaggccaaatgcagggtgctgcacttgggttggggcaatcccaggtatttatacaaactgggggaagatctccttgagagcagccctgcggggaaggacttgggggtcctggtggacgagtagctggacatgagccagcagtgtgcgcttgcagcctggaaggccaactgtgttctgggctgcattaaaagaggagtatccagcagggacaggggggtgattgtgcccctctgctcggctcttgggaggccccatctggagtactgygtccaggcctggggcccccattacaggaaggacatggagctcttggagtgggtccagaggagggccactaagatgatcagagggctggagcacctctcttatgaggaaaggttgagggaactgggattgtttatcttggagaagaggaggctccggggagacctcattgcagccttccttgaaggaagtgtataaacaggagtgggaacagctgtttaaaggatggataatgataggacaagggggaatggtcttaatctgagacaggggag

SEQ ID NO: 94742 - DNA, 600 bp, Chicken  19866894564190_1
agacttgactggatagtggtaatgaacaatctgattcagattatgataacgttagtatttatgcacatgtacatatatatatatatatataaaagagaatcacagaatggtttgtgttggaagggaccttaaagcccacttgctttcaaccctcctgctgtgggcacagtcacctcccactagtcttggttgcccagggcccatccaacctttggtttttctttcaaaaacaaaaacaaaacatgaaaaaccaaacatgcacacacaaacaacaacagtgaaaaacagccaacacaacastaaaacgttcagmagtcaaaatctaatctttgtattctcacaccttagtttgtctgagtgtatacaataggttgggggaytatggccaatcaacatgaagtgagaggagagctgcaagtgtatgtgaaatcatttctaaagcttccaggtgccagatgttaagamgtgatacataactgatgtagggttgcataatcactggtgggaccagtgattaaagggaccactgcattatttttaatttagctttatttgtcttcatttccagacagctgcatgcagtgtgttgcttccttgaac

SEQ ID NO: 94743 - DNA, 600 bp, Chicken  19866894564190_2
tagtggtaatgaacaatctgattcagattatgataacgttagtatttatgcacatgtacatatatatatatatatataaaagagaatcacagaatggtttgtgttggaagggaccttaaagcccacttgctttcaaccctcctgctgtgggcacagtcacctcccactagtcttggttgcccagggcccatccaacctttggtttttctttcaaaaacaaaaacaaaacatgaaaaaccaaacatgcacacacaaacaacaacagtgaaaaacagccaacacaacastaaaacgttcagmagtcaaaatctaatctttgtattctcacaccttagtttgtctgagtgtatacaataggttgggggaytatggccaatcaacatgaagtgagaggagagctgcaagtgtatgtgaaatcatttctaaagcttccaggtgccagatgttaagamgtgatacataactgatgtagggttgcataatcactggtgggaccagtgattaaagggaccactgcattatttttaatttagctttatttgtcttcatttccagacagctgcatgcagtgtgttgcttccttgaactgaaaatgtatgc

SEQ ID NO: 94744 - DNA, 600 bp, Chicken  19866894564190_3
atatatatataaaagagaatcacagaatggtttgtgttggaagggaccttaaagcccacttgctttcaaccctcctgctgtgggcacagtcacctcccactagtcttggttgcccagggcccatccaacctttggtttttctttcaaaaacaaaaacaaaacatgaaaaaccaaacatgcacacacaaacaacaacagtgaaaaacagccaacacaacastaaaacgttcagmagtcaaaatctaatctttgtattctcacaccttagtttgtctgagtgtatacaataggttgggggaytatggccaatcaacatgaagtgagaggagagctgcaagtgtatgtgaaatcatttctaaagcttccaggtgccagatgttaagamgtgatacataactgatgtagggttgcataatcactggtgggaccagtgattaaagggaccactgcattatttttaatttagctttatttgtcttcatttccagacagctgcatgcagtgtgttgcttccttgaactgaaaatgtatgcttatattactgaggtttatttttctttatgtttcccaacagttcaaatagattttttttttttttaa

SEQ ID NO: 94745 - DNA, 597 bp, Chicken  19866894564190_4
acagtcacctcccactagtcttggttgcccagggcccatccaacctttggtttttctttcaaaaacaaaaacaaaacatgaaaaaccaaacatgcacacacaaacaacaacagtgaaaaacagccaacacaacastaaaacgttcagmagtcaaaatctaatctttgtattctcacaccttagtttgtctgagtgtatacaataggttgggggaytatggccaatcaacatgaagtgagaggagagctgcaagtgtatgtgaaatcatttctaaagcttccaggtgccagatgttaagamgtgatacataactgatgtagggttgcataatcactggtgggaccagtgattaaagggaccactgcattatttttaatttagctttatttgtcttcatttccagacagctgcatgcagtgtgttgcttccttgaactgaaaatgtatgcttatattactgaggtttatttttctttatgtttcccaacagttcaaatagattttttttttttttaatggaactatttctaatatgaaactaaacagcttttggaaagttagggtttttttaagtttcataaaaacaagcatattaaaa

SEQ ID NO: 94746 - DNA, 594 bp, Chicken  19866894564196_1
ggtaaaatccaattgggatgtgaaaaccataaggagaaaatccagtgcagggcagcgattgctcgctcacctcctaaatggaaatgcaagcacgggagcttggatttgcattgggtacccacctaacgcaggagaaaacttggatgctcaacaccagaatggatcggtgctgaaaaatcctgcagtaaaggtgtgattggggtccaattttccatatgtgctttttgggatgcccaaagtcctccttgtcccaaagaagaggaccgtggaggtgagaggggtcctacaggggacgctggygtggcratgagarcactgagatccacggtggaggaagaggtggggagcctcagtccttctcaatcccttggatttggggatgtgggagrgggttaaaggatgcagagcccctttggagagggcttgggttgggagacaggtggagggaggtgctggaaacaggatcctggctccggggctgggaaaaactcctttggcacagaggaggagagcagagcaggagagcggtgggtgcccgggatagctgcgatgggggaggggaaagactggtaagtgagacggggtgggtgggga

SEQ ID NO: 94747 - DNA, 588 bp, Chicken  19866894564196_2
atccaattgggatgtgaaaaccataaggagaaaatccagtgcagggcagcgattgctcgctcacctcctaaatggaaatgcaagcacgggagcttggatttgcattgggtacccacctaacgcaggagaaaacttggatgctcaacaccagaatggatcggtgctgaaaaatcctgcagtaaaggtgtgattggggtccaattttccatatgtgctttttgggatgcccaaagtcctccttgtcccaaagaagaggaccgtggaggtgagaggggtcctacaggggacgctggygtggcratgagarcactgagatccacggtggaggaagaggtggggagcctcagtccttctcaatcccttggatttggggatgtgggagrgggttaaaggatgcagagcccctttggagagggcttgggttgggagacaggtggagggaggtgctggaaacaggatcctggctccggggctgggaaaaactcctttggcacagaggaggagagcagagcaggagagcggtgggtgcccgggatagctgcgatgggggaggggaaagactggtaagtgagacggggtgggtgggga

SEQ ID NO: 94748 - DNA, 581 bp, Chicken  19866894564196_3
tgggatgtgaaaaccataaggagaaaatccagtgcagggcagcgattgctcgctcacctcctaaatggaaatgcaagcacgggagcttggatttgcattgggtacccacctaacgcaggagaaaacttggatgctcaacaccagaatggatcggtgctgaaaaatcctgcagtaaaggtgtgattggggtccaattttccatatgtgctttttgggatgcccaaagtcctccttgtcccaaagaagaggaccgtggaggtgagaggggtcctacaggggacgctggygtggcratgagarcactgagatccacggtggaggaagaggtggggagcctcagtccttctcaatcccttggatttggggatgtgggagrgggttaaaggatgcagagcccctttggagagggcttgggttgggagacaggtggagggaggtgctggaaacaggatcctggctccggggctgggaaaaactcctttggcacagaggaggagagcagagcaggagagcggtgggtgcccgggatagctgcgatgggggaggggaaagactggtaagtgagacggggtgggtgggga

SEQ ID NO: 94749 - DNA, 505 bp, Chicken  19866894564196_4
gcacgggagcttggatttgcattgggtacccacctaacgcaggagaaaacttggatgctcaacaccagaatggatcggtgctgaaaaatcctgcagtaaaggtgtgattggggtccaattttccatatgtgctttttgggatgcccaaagtcctccttgtcccaaagaagaggaccgtggaggtgagaggggtcctacaggggacgctggygtggcratgagarcactgagatccacggtggaggaagaggtggggagcctcagtccttctcaatcccttggatttggggatgtgggagrgggttaaaggatgcagagcccctttggagagggcttgggttgggagacaggtggagggaggtgctggaaacaggatcctggctccggggctgggaaaaactcctttggcacagaggaggagagcagagcaggagagcggtgggtgcccgggatagctgcgatgggggaggggaaagactggtaagtgagacggggtgggtgggga

SEQ ID NO: 94750 - DNA, 600 bp, Chicken  19866894564200_1
catataggaaaatataagccaattgatgccatatggccctccaaattgttattccagatgtattccttggagtcacagaattgaagttcctgtttcctttaaataacacattcctaataactcacatgaagcaattttgagtataaagtcatttgttaatatgatttctttcatattcagttccttcttcatttttctggtcacctcagtgcaaattcaagaaactgtttaactatgagatgttaaaccttgaagaagcacaaatgcacttagctttagcttttagcctgagattcctgygtctaggatggtgaccttacatgtataggcatctgacaactaagctgtgcgtattattttttattaacacagaagagctttcatttgctcacagcacttgtttttaagaagctgcgttttcattacctttgtctttgcctttagcctgtagcaaagaaacaaaaacacataatgcacaattctgtggtaatatttgcttaattggaggtcarcacggctaagtaccgctaccagaaactcagaaacagtgatgggagtttgagcaattgctttcttacattgccctgccaacaacctcaa

SEQ ID NO: 94751 - DNA, 457 bp, Chicken  19866894564200_2
aaattcaagaaactgtttaactatgagatgttaaaccttgaagaagcacaaatgcacttagctttagcttttagcctgagattcctgygtctaggatggtgaccttacatgtataggcatctgacaactaagctgtgcgtattattttttattaacacagaagagctttcatttgctcacagcacttgtttttaagaagctgcgttttcattacctttgtctttgcctttagcctgtagcaaagaaacaaaaacacataatgcacaattctgtggtaatatttgcttaattggaggtcarcacggctaagtaccgctaccagaaactcagaaacagtgatgggagtttgagcaattgctttcttacattgccctgccaacaacctcaaccttgttgagccattttctctaagggctagaagtaattaagtttcattgctaaatcactcttgagcctg

SEQ ID NO: 94752 - DNA, 600 bp, Chicken  19866894564213_1
acagagtgaccaaactgtattatgtactacgttgccctgcatggccctaaagtgtaaatgttatttacagtggatttttttcagctcacacataaactaatctcacattttcatacaatgaaactaataacatgttttggtattttttccttcggtgcagcatgaggatttacaagtgcaaagtcaactgctaattcctttgggacacaatgggacaaacacgtgccagtcacgtctgtgtcacttgttggaaaatttggagcagtagctattctaaaatagtgctgtttggcacatttycagaccatgtcgcagatcatgacggcaattaaataatactgatttcttgtcctgtgctgttccttctattctattcaccatcaacctacgtcagattttaaagaagcagactttacagaagcattaaaacagtggcagagcacaacatgaccatctatactttgcttgctggctgaaggctgataggtgaagagctttgagagtcctagatgaaaaacactgtgcagacaatacaacagtagccttgtttgttagtttctgacaagctatgattcagatacacaagtcaaatggtaaact

SEQ ID NO: 94753 - DNA, 594 bp, Chicken  19866894564215_1
atagcagatgtaatatctatgtttagaattaaacgtaaaaaggtatttatattttgatatatagcaagagagagttccaaaatttaaataacaagaagactttttttatccctaaataataaatttgcagaaaggagaattcaagggaagactttgacggtctgtgtgtcatgaacataaactctgtactgtagaagtgttaaaattctaattttatttcttttaaggtgctgctatttttacatttcaagaaaaaaaatgtgtgaattcacacataaaagggcaattgtgataagaagyttcacttttaacagaatatcttatgtgtagggatgagataaaatattttattttcactttttaaggaatggttaaataaccggtccacatgcactttttgcaagttatgatttctttttgaaatctgatggaagaaacatggtctcatctcaaagaatgaaatgatacttactaaacatttatcaacatgattttttttgttcattccgatgaccacttcttgaattgagcaattttttttagggtattcatgttttgtttagtctgttaggtaaccgaactcattttttctat

SEQ ID NO: 94754 - DNA, 600 bp, Chicken  19866894564218_1
tcttcatggattttcacattcatcaaatcttcagttttcagagtgcctttcttttttaatcgcacatgtatgaatgtttatcagaacatctaagtctttcctctaaatgaagtggtacacagtgatattttgggtatctttttatgataaatatataacgttatccaatgcattgctttccataagggaaaacataagcctcagaagatgtaacatttgtttacagcaggctctttttctctgagagaaaaccagatccacagaatttttttttactttgcattattagttaatagcaaragaaaatagagakcaaaattgctgctgcataaacaaacctgttacacagctgcatccagtatccagttgacgatgctggagattgcatgatttacttttttagcaggatcatttttgaataacacggtagttgagcttacacggtttaccaaccacactaatggcagaattatttagggctctgttcttaaagacattacagttgatgattaagatccccttggtataagcatttgcagggtaagtcctagactgtcaaggagatttgtagygtagaggtaaaaagcgactttttcagca

SEQ ID NO: 94755 - DNA, 600 bp, Chicken  19866894564218_2
tcacattcatcaaatcttcagttttcagagtgcctttcttttttaatcgcacatgtatgaatgtttatcagaacatctaagtctttcctctaaatgaagtggtacacagtgatattttgggtatctttttatgataaatatataacgttatccaatgcattgctttccataagggaaaacataagcctcagaagatgtaacatttgtttacagcaggctctttttctctgagagaaaaccagatccacagaatttttttttactttgcattattagttaatagcaaragaaaatagagakcaaaattgctgctgcataaacaaacctgttacacagctgcatccagtatccagttgacgatgctggagattgcatgatttacttttttagcaggatcatttttgaataacacggtagttgagcttacacggtttaccaaccacactaatggcagaattatttagggctctgttcttaaagacattacagttgatgattaagatccccttggtataagcatttgcagggtaagtcctagactgtcaaggagatttgtagygtagaggtaaaaagcgactttttcagcaacaaaaaagtgct

SEQ ID NO: 94756 - DNA, 600 bp, Chicken  19866894564218_3
ttactttgcattattagttaatagcaaragaaaatagagakcaaaattgctgctgcataaacaaacctgttacacagctgcatccagtatccagttgacgatgctggagattgcatgatttacttttttagcaggatcatttttgaataacacggtagttgagcttacacggtttaccaaccacactaatggcagaattatttagggctctgttcttaaagacattacagttgatgattaagatccccttggtataagcatttgcagggtaagtcctagactgtcaaggagatttgtagygtagaggtaaaaagcgactttttcagcaacaaaaaagtgctctattccagtaacagtttctggcaggagactaacaaaacatctgaaaatgctctgaagtacatcttcctagtgtgtcccaacttacaatagggctcaagaccaatacgtacatttttcttacatgaataagatggtatatatatagcaaacatggtataagtaacagctactgtagcttctacgtggggttttttagttgttgtcattatgctgtgtaataattactttttctgaaactttattagtcccttattttaa

SEQ ID NO: 94757 - DNA, 600 bp, Chicken  19866894564218_4
ggtaaaaagcgactttttcagcaacaaaaaagtgctctattccagtaacagtttctggcaggagactaacaaaacatctgaaaatgctctgaagtacatcttcctagtgtgtcccaacttacaatagggctcaagaccaatacgtacatttttcttacatgaataagatggtatatatatagcaaacatggtataagtaacagctactgtagcttctacgtggggttttttagttgttgtcattatgctgtgtaataattactttttctgaaactttattagtcccttattttaaagcaryttttctaactaatggtgtatggatgttagaaggcaaagactagatgggttttagtcacttcgtgttaaacaattaatacacttgaagttgttctgagccttatggatgtgtgtattgtgctgcacttaaatctgaaatcactgtgattttctcgcctttgttttaatgccctatatcttctcttcccttttatccagtgcagcatgccaatacattcacctttttctatctgcttcagatccaacatccaaagctgtgtatgggcccaaggcctgtgcaaaattcctatcttgcataaa

SEQ ID NO: 94758 - DNA, 600 bp, Chicken  19866894564218_5
gtaaaaagcgactttttcagcaacaaaaaagtgctctattccagtaacagtttctggcaggagactaacaaaacatctgaaaatgctctgaagtacatcttcctagtgtgtcccaacttacaatagggctcaagaccaatacgtacatttttcttacatgaataagatggtatatatatagcaaacatggtataagtaacagctactgtagcttctacgtggggttttttagttgttgtcattatgctgtgtaataattactttttctgaaactttattagtcccttattttaaagcaryttttctaactaatggtgtatggatgttagaaggcaaagactagatgggttttagtcacttcgtgttaaacaattaatacacttgaagttgttctgagccttatggatgtgtgtattgtgctgcacttaaatctgaaatcactgtgattttctcgcctttgttttaatgccctatatcttctcttcccttttatccagtgcagcatgccaatacattcacctttttctatctgcttcagatccaacatccaaagctgtgtatgggcccaaggcctgtgcaaaattcctatcttgcataaat

SEQ ID NO: 94759 - DNA, 600 bp, Chicken  19866894564225_1
ccaaagtgtacaattaggattcagtggccctgatcacctcccaggcacctatagcccagacagtcccttgtctctactccagtggttccacagcagggctcatttccagctccccatagccctgccttgtcctatccccacagagctgcctggccatccttgaacctgatggtggcctgcagatggacatcctggcttggtattggacctgcttcatcaccatgaactggtgacctgatctggagtagtttttcagggtttggctcagattggaacacttaactggactctcctggattrcagtgcttgtactgatactgataatgacaaatgacagacattaaacttttgagactatrtgcccttgtgtgacctgtaaagtaaggcataattatctaaaatgggtgacttctgcacacggtttggaaatgaggaaacagtggattttcagcaaaagaagcagacaggctaccagagtagcagatgtgcagctgagcagaatgaccatctgcagacatctcagagagcatctggagattgatgacaagataaaatcctacccatgaccacagactccatttcagcccagggtcataagtc

SEQ ID NO: 94760 - DNA, 600 bp, Chicken  19866894564225_2
acagtcccttgtctctactccagtggttccacagcagggctcatttccagctccccatagccctgccttgtcctatccccacagagctgcctggccatccttgaacctgatggtggcctgcagatggacatcctggcttggtattggacctgcttcatcaccatgaactggtgacctgatctggagtagtttttcagggtttggctcagattggaacacttaactggactctcctggattrcagtgcttgtactgatactgataatgacaaatgacagacattaaacttttgagactatrtgcccttgtgtgacctgtaaagtaaggcataattatctaaaatgggtgacttctgcacacggtttggaaatgaggaaacagtggattttcagcaaaagaagcagacaggctaccagagtagcagatgtgcagctgagcagaatgaccatctgcagacatctcagagagcatctggagattgatgacaagataaaatcctacccatgaccacagactccatttcagcccagggtcataagtccctggctactaagcctgtgaaatctagagcgaaagaacctttcaagtggctgagtaatt

SEQ ID NO: 94761 - DNA, 600 bp, Chicken  19866894564226_1
cgaccgccctcacagaatgacttttgagttaaaactatcagatgcttaagatctcatcatatattcgctaaaagtgattaacatttctcccgttacataaacttgtcatgcagtgttcctctgcgctgtgtttcttgtcagatactggctgtggagtttttagctgtgcctaaagattaattctcctctggttttgaggctccatccgttctcatggctgactcatgacccgtcttattatttgccaggtttaagtgtggtagctaggagactaatacagcaacactgattgttttctcrtgtttgcccagtttagaatatcttgcgtagccaaatattgcagcagatacttcagttctattaaaatgttactagatactgcatcgatccagaaattaataacaccacttttcctgttttygtgctatataaaccaatgtatgcacttaagagcttcctcagctttagtttggattacaaacctgccataataaacctggcaaatgttttgtataagcacagctgtaaacatgtatgggttcgaaatcacaattttacttcctttcttaaaaggggaaagctcacaaaagggaaatgttg

SEQ ID NO: 94762 - DNA, 600 bp, Chicken  19866894564226_2
tgcgctgtgtttcttgtcagatactggctgtggagtttttagctgtgcctaaagattaattctcctctggttttgaggctccatccgttctcatggctgactcatgacccgtcttattatttgccaggtttaagtgtggtagctaggagactaatacagcaacactgattgttttctcrtgtttgcccagtttagaatatcttgcgtagccaaatattgcagcagatacttcagttctattaaaatgttactagatactgcatcgatccagaaattaataacaccacttttcctgttttygtgctatataaaccaatgtatgcacttaagagcttcctcagctttagtttggattacaaacctgccataataaacctggcaaatgttttgtataagcacagctgtaaacatgtatgggttcgaaatcacaattttacttcctttcttaaaaggggaaagctcacaaaagggaaatgttgggggtgggcaagcagagagaagacgtaggggaacacaaaatcgggtctcttgtgtttacagcacaggtgggattccaggaggataagcaaattagaaaaccagactaaacagaaaacagtg

SEQ ID NO: 94763 - DNA, 600 bp, Chicken  19866894564245_1
aaagaccttcaagatcatcaagtccaactgcaacctaaccatactaccctaacaacactcagctaaatcatgtccctgagcaccacatccaaatggtttttaaacacattcagggatggcggctcaaccacctccctggggagcctattccagtgctaaacaaccctttctgtaaagaacttcttcctgatactcaacctaaacttcccctggcgcaacttgaggccaatgctattgtctttccttaaagctcactaggagagggactgaagccctatcatcacctgagttagtaacttrgcatcagtgaagagtggcatttttatgtttttagtttcttttctggcagaagggcagagcagggcatgttgatgtactgggtacaaggtaatctgaattcatgtccttttttatcttacccacgagctgytccaatttctacataattttttaagtgttaatagtgccttcttgggaaagtgcagcacctgggtataacatctgttctgaaatataatttacttgtaaaagcgtcaagagaaaacactgaattagcttatcatttagtgattatggcttagtgagtccctagaaattaag

SEQ ID NO: 94764 - DNA, 600 bp, Chicken  19866894564245_2
cctccctggggagcctattccagtgctaaacaaccctttctgtaaagaacttcttcctgatactcaacctaaacttcccctggcgcaacttgaggccaatgctattgtctttccttaaagctcactaggagagggactgaagccctatcatcacctgagttagtaacttrgcatcagtgaagagtggcatttttatgtttttagtttcttttctggcagaagggcagagcagggcatgttgatgtactgggtacaaggtaatctgaattcatgtccttttttatcttacccacgagctgytccaatttctacataattttttaagtgttaatagtgccttcttgggaaagtgcagcacctgggtataacatctgttctgaaatataatttacttgtaaaagcgtcaagagaaaacactgaattagcttatcatttagtgattatggcttagtgagtccctagaaattaagaaatggttggttcaaatttcctcagggaaaggaataaactgaatggtgctctttccatcctgacggatgcctaacctctctgttactcagccatgaatactatcacctggcagcagttttgtgaacacag

SEQ ID NO: 94765 - DNA, 599 bp, Chicken  19866894564247_1
  misc_feature (1)..(217): n is any nucleotide
nnnnnnnnnnnnnnnnnnnnnnnnnnnnnnnnnnnnnnnnnnnnnnnnnnnnnnnnnnnnnnnnnnnnnnnnnnnnnnnnnnnnnnnnnnnnnnnnnnnnnnnnnnnnnnnnnnnnnnnnnnnnnnnnnnnnnnnnnnnnnnnnnnnnnnnnnnnnnnnnnnnnnnnnnnnnnnnnnnnnnnnnnnnnnnnnnnnnnnnnnnnnnnnnnnnnnnnnntcagggaaaaaaataagtcatgaaaatgttcttcttactgtcaagaaggaactgacagagactgaaggaaggatgcaggatcygagatttctgagtacagaagtacttgtgggtgggattcagtattcaaaagcaaggcatggttctttcacatatttgatatcaaggcatagtttgatacagcamacgtgttcgacagaatttaggttaagatgtagttgagtgtgttaaaatasattaatatggaagatggattatgcttcaaaaggctaaagagtctgcattttgtcagtgccacacacatctatacatacagttataaatagtctcacccctcagactgcatggtagaagaggtagcagatgtctgtctcgctcagtt

SEQ ID NO: 94766 - DNA, 599 bp, Chicken  19866894564247_2
  misc_feature (1)..(114): n is any nucleotide
nnnnnnnnnnnnnnnnnnnnnnnnnnnnnnnnnnnnnnnnnnnnnnnnnnnnnnnnnnnnnnnnnnnnnnnnnnnnnnnnnnnnnnnnnnnnnnnnnnnnnnnnnnnnnnnnnntcagggaaaaaaataagtcatgaaaatgttcttcttactgtcaagaaggaactgacagagactgaaggaaggatgcaggatcygagatttctgagtacagaagtacttgtgggtgggattcagtattcaaaagcaaggcatggttctttcacatatttgatatcaaggcatagtttgatacagcamacgtgttcgacagaatttaggttaagatgtagttgagtgtgttaaaatasattaatatggaagatggattatgcttcaaaaggctaaagagtctgcattttgtcagtgccacacacatctatacatacagttataaatagtctcacccctcagactgcatggtagaagaggtagcagatgtctgtctcgctcagtttaaaaataaactggcattgatgcttttcacttcatgaattattgtaccgtgtggggttttctcgtggtgtctgaacattgtcctgtttcttcccaatttacat

SEQ ID NO: 94767 - DNA, 599 bp, Chicken  19866894564247_3
  misc_feature (1)..(64): n is any nucleotide
nnnnnnnnnnnnnnnnnnnnnnnnnnnnnnnnnnnnnnnnnnnnnnnnnnnnnnnnnnnnnnnntcagggaaaaaaataagtcatgaaaatgttcttcttactgtcaagaaggaactgacagagactgaaggaaggatgcaggatcygagatttctgagtacagaagtacttgtgggtgggattcagtattcaaaagcaaggcatggttctttcacatatttgatatcaaggcatagtttgatacagcamacgtgttcgacagaatttaggttaagatgtagttgagtgtgttaaaatasattaatatggaagatggattatgcttcaaaaggctaaagagtctgcattttgtcagtgccacacacatctatacatacagttataaatagtctcacccctcagactgcatggtagaagaggtagcagatgtctgtctcgctcagtttaaaaataaactggcattgatgcttttcacttcatgaattattgtaccgtgtggggttttctcgtggtgtctgaacattgtcctgtttcttcccaatttacatgctgcgtcaggactagctgaaaatgtttcctgtccctgtacagtaaatta

SEQ ID NO: 94768 - DNA, 461 bp, Chicken  19866894564247_4
ggtagaagaggtagcagatgtctgtctcgctcagtttaaaaataaactggcattgatgcttttcacttcatgaattattgtaccgtgtggggttttctcgtggtgtctgaacattgtcctgtttcttcccaatttacatgctgcgtcaggactagctgaaaatgtttcctgtccctgtacagtaaattattagcaatctgtcagctcctgttctcaggcacggcacaaggacagtcaggctcttactgggtttttacttcacactccttcagcaattgaaaactgagaaaggggaaagarcttttatagaacaaactgaatttaatacttcaaaactacagcgccgtcaartttaaggaaagcttactgagtgctcaccactataacataaggaagaaagttcctgaagcattattgcaggctgcagtgaactaaatgcctgtaaaatgtaaaatgtaagt

SEQ ID NO: 94769 - DNA, 410 bp, Chicken  19866894564247_5
attgatgcttttcacttcatgaattattgtaccgtgtggggttttctcgtggtgtctgaacattgtcctgtttcttcccaatttacatgctgcgtcaggactagctgaaaatgtttcctgtccctgtacagtaaattattagcaatctgtcagctcctgttctcaggcacggcacaaggacagtcaggctcttactgggtttttacttcacactccttcagcaattgaaaactgagaaaggggaaagarcttttatagaacaaactgaatttaatacttcaaaactacagcgccgtcaartttaaggaaagcttactgagtgctcaccactataacataaggaagaaagttcctgaagcattattgcaggctgcagtgaactaaatgcctgtaaaatgtaaaatgtaagt

SEQ ID NO: 94770 - DNA, 600 bp, Chicken  19866894564255_1
ctttcattctctttgtcaacaactcgctcttaatcactggtaatcttccctaaatttatttccctttacttacacagccattcgctgaatttcaaccagaagtttctgagtttcatcacatcctgcacattttgtcctcacagaacaacaattgtaatcattttgaagatattttataatttgtcataaaaatatttccctgatattatatatattaaaaacaaatcttagttcctcccatgttgaaacatattttacatctgaaaagatacacacagcacgtttagcctttttaaaaastgctgagttcagcactgattcacaaaacacaacctggaactagactgtaacctaaatggtttttatccaaaaatttaaaaggcttcytaatatttttatggagtaaaataawttatggaattgcaggttgtgaccatgacttgcaaatgtcatactaactgaaaaacagaataatcttcatctcttgtgtagtcctgttatgaaccatttaataaatgtaatataaatgactatacaaatgcaacaatgccttgtttacatgagagataaaagacgcataaagataacaacagcagcacc

SEQ ID NO: 94771 - DNA, 566 bp, Chicken  19866894564255_2
aatttcaaccagaagtttctgagtttcatcacatcctgcacattttgtcctcacagaacaacaattgtaatcattttgaagatattttataatttgtcataaaaatatttccctgatattatatatattaaaaacaaatcttagttcctcccatgttgaaacatattttacatctgaaaagatacacacagcacgtttagcctttttaaaaastgctgagttcagcactgattcacaaaacacaacctggaactagactgtaacctaaatggtttttatccaaaaatttaaaaggcttcytaatatttttatggagtaaaataawttatggaattgcaggttgtgaccatgacttgcaaatgtcatactaactgaaaaacagaataatcttcatctcttgtgtagtcctgttatgaaccatttaataaatgtaatataaatgactatacaaatgcaacaatgccttgtttacatgagagataaaagacgcataaagataacaacagcagcaccagtaaactgtgaccggtacggtgaactcttccaacttgatgattatgtaaata

SEQ ID NO: 94772 - DNA, 541 bp, Chicken  19866894564255_3
tcatcacatcctgcacattttgtcctcacagaacaacaattgtaatcattttgaagatattttataatttgtcataaaaatatttccctgatattatatatattaaaaacaaatcttagttcctcccatgttgaaacatattttacatctgaaaagatacacacagcacgtttagcctttttaaaaastgctgagttcagcactgattcacaaaacacaacctggaactagactgtaacctaaatggtttttatccaaaaatttaaaaggcttcytaatatttttatggagtaaaataawttatggaattgcaggttgtgaccatgacttgcaaatgtcatactaactgaaaaacagaataatcttcatctcttgtgtagtcctgttatgaaccatttaataaatgtaatataaatgactatacaaatgcaacaatgccttgtttacatgagagataaaagacgcataaagataacaacagcagcaccagtaaactgtgaccggtacggtgaactcttccaacttgatgattatgtaaata

SEQ ID NO: 94773 - DNA, 599 bp, Chicken  19866894564266_1
  misc_feature (1)..(118): n is any nucleotide
nnnnnnnnnnnnnnnnnnnnnnnnnnnnnnnnnnnnnnnnnnnnnnnnnnnnnnnnnnnnnnnnnnnnnnnnnnnnnnnnnnnnnnnnnnnnnnnnnnnnnnnnnnnnnnnnnnnnnnttcttctgtggtgctgttttccccgcttatatctgtcattcaggcctttatttccaaggagtgcagtgtgttcataaatgctttattatcatgtttcagaccagggctctgtaataagacaacaactgcagctctgtagtgaaagctgggtacttttcagtgctgtatatttactgaaatgsaaatttttcatttcaaagtgacttaaatattcatcatttaagatgggtgttgcatttgtcctagcccctattaatgcagtgtatgtttgtgttgttgtgggcttattctcttagtaaataaggcagggagacattaaagtgtaaaaaataaatgcagcaatactggccatagaacgctgcacatctagcctgcacccatgaaagctcaattgaccaacagccaatgcatatgctagttacaaatagtaaacacatactcaaagttttgccgtaagactttattagaatgtatagtctct

SEQ ID NO: 94774 - DNA, 474 bp, Chicken  19866894564269_1
agttaagcatctgggcaaatttagatgcttgtgttttccaaactttttctttaagtattttgtatcactccccacccttctaccagtctcatcagtaccctatactccatatttaagccccacagtgcagaatacccattagcatactcagaatacaggtcatttggaatggctttttacaaaacaaattgaatgctaaaggacgtgcagtgttgttttaaaaggagacacatgcactcatgtgcaaagcctgttttgataaagtgaacattttgtcaagtgataatgcgctaggggccrgcttctgagagctagaaacaacacttctatgtgcatgtaggcttgaattaagcttgtgtaaaacaaattacgtgtgtgagggtacgtgtatgcagagccatggtgtaactgcagccagaagaggtctacagaattgttgttctgctgcttcctaccctgaagcatgcaggagag

SEQ ID NO: 94775 - DNA, 600 bp, Chicken  19866894564270_1
cagtcaagataatacagagttgcattttctagcatcagtgaattgtgaatctcattgaatcatggcaaagtgaccactgaggtcatggtatggaaaacatcaagaagtatatgactagatggtctttatgatctgtggctcatgtaaattcaaacttttgttttattttattgctttgggttttaataattgcaacgcatttccatttgtttttcttcccatagtagaggaacctctccttagcaaactcactgtatcaaatgctacctcagactccatgttgctcatgtgggaagcacrggacaatgcctttgaccattttattctagaagtcagaaactctgactcccctttggactccctggtgcaaatagtgccaggggcctcccggcactatgtagtcaccaacctcaaagctgccactaattacactgtccagctccatggtgtagttgatgggcaaggtggtcagaccttgacagcactggcaaccacaggtatttcattgtttcaccttctaggtttgcttttttctcttctttctttttctgttcaccaagccgctctgaaacgtggctcttactcrtcatctttatactt

SEQ ID NO: 94776 - DNA, 567 bp, Chicken  19866894564270_2
atgtgggaagcacrggacaatgcctttgaccattttattctagaagtcagaaactctgactcccctttggactccctggtgcaaatagtgccaggggcctcccggcactatgtagtcaccaacctcaaagctgccactaattacactgtccagctccatggtgtagttgatgggcaaggtggtcagaccttgacagcactggcaaccacaggtatttcattgtttcaccttctaggtttgcttttttctcttctttctttttctgttcaccaagccgctctgaaacgtggctcttactcrtcatctttatactttatactttgataaagtattggaagatcaccgtgagggaaggctgaaataaactgaccttgtgagtgcttggaaagagagatatccgagacaatggaaaaggctggaaaagtgcccccagcattaagggagccagttgtaaaccatgactggtttcattatatatacacttaccagcaagtactgggtatatatagctgacatgctccagatggttaatgtttttcacagaatatctttgcacttgatctgagt

SEQ ID NO: 94777 - DNA, 600 bp, Chicken  19866894564280_1
agaatattgcaaaaaaatctcaagacatacaagctgggctgaagaagcaatagtaagtatgtagcacaaaactggatgaaaaacagatacataaacatttccatctgtaatctctctgacacatggattattgctgaagtttaaattctgagattcaacatcttagcatttatccacttctaacatggatcttctgaaatcttgccaagggaatgccagctaagtctaactgtcctcatatctctttaagatatgcacaaacagtaaaaccatagaagagtgaaacaacttccaaaaagrattccaggtcattgagtctgactggaaatagtgtgaagcatatctggccatattagttattccacagtctattcacagaaacagtattgtctgattgcaagacgtcttgtcaaatctttgcataatcacaacccatcagcaggacaaagcaaatgaagtgcaaatattagaagatgaaacaattacttttcgttgaatacagaggaatggtaattatgatctgattttgtttcctttttaatagctttatgtcatctacttccaccatgtgcgcctttggttgggaaattttatgattaa

SEQ ID NO: 94778 - DNA, 595 bp, Chicken  19866894564290_1
caccacccactgactgatgcccagctagtccacaagcagcaaaaggcctccctgtgagctcttctctttttcagactttccttttccatgatgtcatatggtatgaaatattcctgtggccaatttaggtcagctgttctgattctgtccccttccatctccttgggacccctcagcctccctgctggcaagacagcaggaaaggttgaaaaacaaagatgtccttgactctgtacagcactgctcagcaacaactaaagcatcaatgtgtgacttatattgcttttctcctaaaaccawaatatggcatcttacaaaactgtgaagaaaaacaaaactgtcctagctgaaactaagacaatttgtgattttgaaatgtagtctctgtaactttttttttcctaataattttcctaattttatgatcttctgtctactcctacttttctctcctgagttattttgctgtgttttctttctgttccattcagcttactcctattcataatcagtgctcagctttcctgttcactttcctacttctgtatgagctactatgtgattgactacacccatggcaagcattttcctatga

SEQ ID NO: 94779 - DNA, 599 bp, Chicken  19866894564304_1
  misc_feature (1)..(40): n is any nucleotide
nnnnnnnnnnnnnnnnnnnnnnnnnnnnnnnnnnnnnnnnctacaacccaaaacccagtatttttaggtttgtttgtaagatgtaaaaaagcaaccttttattcttgttcattgagaaaaccctcctgtagaagtggcttctctcacaaggttgaacgaatgatctgtgcatttccacatagtatgacctgcaaagactgtcaggagagtagtaaatctgagtgtcctctaatgacagtaacagagctcctgatactgtacatacatcctcagatactgatgtacattgttgctagtgtsccacrcagagctcccttgctaggtttgatgcctacaggttttcatacaaatgcaaaagctcagtggtgcagtaattgctgtgggaacattccttttaatttaggatgtcctttttaaaaataactgcagaggctcagaaggaaggaaaaaaatgagcagcttcctttcaggaagccaaacggaaatgtgctggaaagcttgcattattgtgtagttcaaaatgagggaaaaatatagcaaaaactcagctcacaacccaagcaaacctgaagagctcaaaatattttttctagaactgt

SEQ ID NO: 94780 - DNA, 599 bp, Chicken  19866894564304_2
  misc_feature (1)..(35): n is any nucleotide
nnnnnnnnnnnnnnnnnnnnnnnnnnnnnnnnnnnctacaacccaaaacccagtatttttaggtttgtttgtaagatgtaaaaaagcaaccttttattcttgttcattgagaaaaccctcctgtagaagtggcttctctcacaaggttgaacgaatgatctgtgcatttccacatagtatgacctgcaaagactgtcaggagagtagtaaatctgagtgtcctctaatgacagtaacagagctcctgatactgtacatacatcctcagatactgatgtacattgttgctagtgtsccacrcagagctcccttgctaggtttgatgcctacaggttttcatacaaatgcaaaagctcagtggtgcagtaattgctgtgggaacattccttttaatttaggatgtcctttttaaaaataactgcagaggctcagaaggaaggaaaaaaatgagcagcttcctttcaggaagccaaacggaaatgtgctggaaagcttgcattattgtgtagttcaaaatgagggaaaaatatagcaaaaactcagctcacaacccaagcaaacctgaagagctcaaaatattttttctagaactgttactg

SEQ ID NO: 94781 - DNA, 600 bp, Chicken  19866894564315_1
ttgactgagtggaatgaaattccccaccagtataaatagaacaaatcccattgtggtgtgacacatagcaaggaattgactgatccttccatattgtcaagcacatggagtgatcttgaggtatatgtcaaagaatcactatgatatgctatgacattagcacaaaaatccttatgtttcacctgtgatgtacacatagctgcctctaatgcaaaataccagggctcaatttccccactccaggaaaaatcctggaaaacgggattatctgtttcgtcagtaagcaatagcagtccctgsagcaccttcccatgggttctgcagcatttttctatgggaaataggctccagagtttctacccccacctacttaggtgtcctcagtgtctttctgcacgcagcaggggttctcctgtgccagtgcctcttttattggagtgatgtgtggctcatggtaccattcattataatgaaagctaaacatcttgcctattttaatgtaagtgctctatattttataagctcttctaactcaggaaaaaaaaatgagaaaaacctcctaaagttttcccagagacctaagaggaagggtgaagaaag

SEQ ID NO: 94782 - DNA, 599 bp, Chicken  19866894564318_1
  misc_feature (1)..(106): n is any nucleotide
nnnnnnnnnnnnnnnnnnnnnnnnnnnnnnnnnnnnnnnnnnnnnnnnnnnnnnnnnnnnnnnnnnnnnnnnnnnnnnnnnnnnnnnnnnnnnnnnnnnnnnnnnntccccttgggcctggctcctcagtggtgccacagcgactgcgcttccgactgcacctccaactgcaacacctctccaatgaggacaggttgggggagctggggctgtgcagcctggaggagagaaggctgcgaggtgacctgagagcagccttcagtagctaaaggggagcaacagactcttcagtagggcctrtggtgacagaacaaagggaaatggcttcaagctccaagagggcagatttagtttggatatcaggtatttgaaaagctccacggtggaagtaaggcactgaagtcactcaccacttacacacaagactcaacctggggaaagttcatttattgacaatgaaaatacagttgggtagtgagaaacaaagaccaactaaaaggcaccgccatctcagttgctgggctctaccactctgtgtggccgggctgctggatgtggctgcactggtacagggcagccccagcatctcttcgcagcct

SEQ ID NO: 94783 - DNA, 599 bp, Chicken  19866894564330_1
  misc_feature (1)..(102): n is any nucleotide
nnnnnnnnnnnnnnnnnnnnnnnnnnnnnnnnnnnnnnnnnnnnnnnnnnnnnnnnnnnnnnnnnnnnnnnnnnnnnnnnnnnnnnnnnnnnnnnnnnnnnncttctatatatctaggattacaaggaaacaattacatggcattccccgtacttccacagagaactcaaggatttgaaaaagtaccattactgtgcagtgttttcctgtgttttctacatatttgctgtgagagccacagatggtgtgtagttacaacttggggttaactggcaagcagtagttttggagaactaattyagattgtacagtagcatctatggaagtgcttttccatgtgtcatgagaggcactcrctctcatgtataaacccacatactgtgagccagtttattctgacagaatctttagtttatggtgttacatgaaattcttttagaggtaacatccattgcttacatgcctaagctatgttttgctgcagaaatacascactacttaaaaacattctctgtttcctgcggtagcatgcatccttttgaacagcgttataaaggagactcttttcccccagtgtacgtctgcaaactgctctaccc

SEQ ID NO: 94784 - DNA, 599 bp, Chicken  19866894564330_2
  misc_feature (1)..(46): n is any nucleotide
nnnnnnnnnnnnnnnnnnnnnnnnnnnnnnnnnnnnnnnnnnnnnncttctatatatctaggattacaaggaaacaattacatggcattccccgtacttccacagagaactcaaggatttgaaaaagtaccattactgtgcagtgttttcctgtgttttctacatatttgctgtgagagccacagatggtgtgtagttacaacttggggttaactggcaagcagtagttttggagaactaattyagattgtacagtagcatctatggaagtgcttttccatgtgtcatgagaggcactcrctctcatgtataaacccacatactgtgagccagtttattctgacagaatctttagtttatggtgttacatgaaattcttttagaggtaacatccattgcttacatgcctaagctatgttttgctgcagaaatacascactacttaaaaacattctctgtttcctgcggtagcatgcatccttttgaacagcgttataaaggagactcttttcccccagtgtacgtctgcaaactgctctaccccaatctctccaaccctcagtttaaaatatacatgttactcaatcccacagcagact

SEQ ID NO: 94785 - DNA, 600 bp, Chicken  19866894564330_3
tgtgcagtgttttcctgtgttttctacatatttgctgtgagagccacagatggtgtgtagttacaacttggggttaactggcaagcagtagttttggagaactaattyagattgtacagtagcatctatggaagtgcttttccatgtgtcatgagaggcactcrctctcatgtataaacccacatactgtgagccagtttattctgacagaatctttagtttatggtgttacatgaaattcttttagaggtaacatccattgcttacatgcctaagctatgttttgctgcagaaatacascactacttaaaaacattctctgtttcctgcggtagcatgcatccttttgaacagcgttataaaggagactcttttcccccagtgtacgtctgcaaactgctctaccccaatctctccaaccctcagtttaaaatatacatgttactcaatcccacagcagactaatgaagcaagcagatacacaagatgcaaagggccatgctaaatacttcagaggaacgtaagattttactgctatgaaaatgataggatgaaatgtaataaggtgtgagtaaaagttgcaggagtgatacaccaagg

SEQ ID NO: 94786 - DNA, 600 bp, Chicken  19866894564348_1
catggtttataaaatagttccataatgtctgtaatgaggttcttagcaattaatctgaaacacaacaaaagcctcccccgccttcagatatgcaagcgtgtcttcaaattatatatggagttgtatatggttgcatctgggaacacagagggactcagaaagaaagtggcaatggggactcaggaacagtgaattccctttccagcccagctatggcactgcttttgcaaatgtatgtaaattactagcatttctaacctaaaattctccatgtaatatctaactcacactgatgttgtragtgtctggagactcagcctgagctaaccaaatgcaaagcattcatattttcttaaatatatgaaatattctacagacaatacatgtgttttactcttttccttgaggcttcaragtggtttagtgcaagtagatgtccgggcctgaaatgtcaaaatgtacctcctagtatccattattttttaaattaagaaagctgatcctaagtaccttaagtgccaataattctctatgggcttataaatgtaccggggttaaacagagagatgtgttagttataatttcaaatatgtctgctga

SEQ ID NO: 94787 - DNA, 600 bp, Chicken  19866894564348_2
atggagttgtatatggttgcatctgggaacacagagggactcagaaagaaagtggcaatggggactcaggaacagtgaattccctttccagcccagctatggcactgcttttgcaaatgtatgtaaattactagcatttctaacctaaaattctccatgtaatatctaactcacactgatgttgtragtgtctggagactcagcctgagctaaccaaatgcaaagcattcatattttcttaaatatatgaaatattctacagacaatacatgtgttttactcttttccttgaggcttcaragtggtttagtgcaagtagatgtccgggcctgaaatgtcaaaatgtacctcctagtatccattattttttaaattaagaaagctgatcctaagtaccttaagtgccaataattctctatgggcttataaatgtaccggggttaaacagagagatgtgttagttataatttcaaatatgtctgctgattgtgttggactgccacggaggagaaatgggactggattgctaatgagatagataagtccttggcaattacaacaatactcttctacatctccaaacaatcaatcatcaatggt

SEQ ID NO: 94788 - DNA, 600 bp, Chicken  19866894564350_1
gtattgtgcttctcatgttttgggtgtttcaagcaagaaagatagggaagagcagccatcaattaaaaaaataagaatgtatgagcaggaacaactttaacaaattgtttaaggtcactgactcatctcatggatgcaaaataatgaaagcatccaaaagatgttttgacaagatgtgaatcaccatattatagctaatgggttttgaagcctggcacttgtgcactgcgtatgcatcttagtgcaaataatagatctgtgccatccaagctcctttgtgcccggcagtgactctgagcrctggtgctcagctaagcagtgttagcttctgccccttccagcagaactaacctcagttttcaggtgaacaaaatagcaggccacagctgcaggcaaggcttcaaggggaaagttaaaaaaaaaaaaaaaaaagcctgtttcccaatgcacacattatttttcaaacaggaatgagaacagaaacaggaaaccagatagtctccttcagaaaactaatgaaaagggtgttcacaaataagccaagatattgctcatattttctttaccatgagattcaraagtcagggctggaagaacctc

SEQ ID NO: 94789 - DNA, 600 bp, Chicken  19866894564350_2
tgcccggcagtgactctgagcrctggtgctcagctaagcagtgttagcttctgccccttccagcagaactaacctcagttttcaggtgaacaaaatagcaggccacagctgcaggcaaggcttcaaggggaaagttaaaaaaaaaaaaaaaaaagcctgtttcccaatgcacacattatttttcaaacaggaatgagaacagaaacaggaaaccagatagtctccttcagaaaactaatgaaaagggtgttcacaaataagccaagatattgctcatattttctttaccatgagattcaraagtcagggctggaagaacctccctcagccacctctgcttcccagagaggcagttccaatcatacagagccaattgcacccatctgtttttttctacagtcggtgctttccagcagtgcgtcctgtgaaccaacatgtccatgaccattaaacagcccagaaaagagagaaaaaaaaagccttcccacagcttcccagttgggtttttcagtcatggtggtgaaagacccagtgcgtctctcttgattcccttgagttattgatggatccctaaattagatgaacagactcaggcaggct

SEQ ID NO: 94790 - DNA, 600 bp, Chicken  19866894564356_1
atgctggggactattttcctgcccatattgcaagcagcagagacaggtggaggccattagggaggtgctagaatctgttgttcacttttgttccccgtgatgacgacctgagccagggaaggaaacaaatgcatggggtgcaggtttccttttgtatgccctgaaaacatatgctttttaggtgcaggaaaggagactggttcatctagatccctttctctctctaaccttgtgttttctttatttaaaaaaatggctggttctgtaaaaatgtagcttgttaccattgctgcagaaatraacaggagagctgtgacttttgtaaagcaatttgcaaarctctcgtaattgctcaggacagttcccagatctgcatcaagggggaaggtctggctggagggaggagtagacgcccccagctctaattgaagtcagtgggaactccagatgctttattttacaaatcagaacctacctgtccctagtgctatctctttttgatttgagaaatatttaggccttgtcagaattgtttcattaagagaagagaagaggtataattcaaacattccccctgctgcaatcctgtatttttatgag

SEQ ID NO: 94791 - DNA, 600 bp, Chicken  19866894564356_2
gagacaggtggaggccattagggaggtgctagaatctgttgttcacttttgttccccgtgatgacgacctgagccagggaaggaaacaaatgcatggggtgcaggtttccttttgtatgccctgaaaacatatgctttttaggtgcaggaaaggagactggttcatctagatccctttctctctctaaccttgtgttttctttatttaaaaaaatggctggttctgtaaaaatgtagcttgttaccattgctgcagaaatraacaggagagctgtgacttttgtaaagcaatttgcaaarctctcgtaattgctcaggacagttcccagatctgcatcaagggggaaggtctggctggagggaggagtagacgcccccagctctaattgaagtcagtgggaactccagatgctttattttacaaatcagaacctacctgtccctagtgctatctctttttgatttgagaaatatttaggccttgtcagaattgtttcattaagagaagagaagaggtataattcaaacattccccctgctgcaatcctgtatttttatgagagcatatgggaaggcctgtgtttctacgtgcaaaataca

SEQ ID NO: 94792 - DNA, 567 bp, Chicken  19866894564357_1
cctgcatttgtagtttagaaacttagaaaaacctcccttcagcactgtattattaaatctgagataaactttcttctccttccctcacatccactgccccaactccagcctcacacaatgcacacgaggaacaagggcacatctgcaaagtgctatatgtattaagcaccatgagcagaaacatttgcatcaagagccctgacagatacatgggaatgaacgcaatacagtttacttctattctagtacatgtctgagtccaaaaacaataaaagtccaaccccgagttcttttcacaaygtgcacagcagaacagcaaagcaggagaaaagcacagtctggcaatcatcagttggctaggcaggctgcaaaattctccagctttccttatgttcagaagctaacgaagacatggctagtggctcacaaatgctgtttataaactcaccagcactgttttaataactgtatgctcattctgacactatgtgaggtgtagggaaggttacatctcgagcaaagcattggctgcatactgacccaaagaatataatatttttacttagt

SEQ ID NO: 94793 - DNA, 600 bp, Chicken  19866894564365_1
aattgaatagattaacagcaaatgaaaaagcagaccagtagttctaatacacaaaacatattataaacatgggaatatagaaagtaggttgttgctattatggctgtagaagaagcaatcatcaggaacaatactataaagccactgctgaaaatggaagaagacagtacgtaacaaactctgttgagggttaaaacagtttttacacagattatgaaggactgacaaattgaaagtagcaaacagattttcttctcaaaggagaatctgatgagtctttctaggtcagtagtcatcagracaatactactacatactcagtggaattgctgcaacttggacttctgtcaggttagtacaattatgtcgtgccagtgaaaatcatggaattaatttcagcctggaaaggttttttctctagtcgttctcagcagtcaaagaacagagaggatgtagaaggctgttctggaaggagtacaataggccatgggacctagaggctagagcttgtccaaagtcttctccccagccctcagatgaacaatactgcagatacagtcatggtttttttctctgatccaagaccactgccaaccacac

SEQ ID NO: 94794 - DNA, 599 bp, Chicken  19866894564370_1
  misc_feature (1)..(39): n is any nucleotide
nnnnnnnnnnnnnnnnnnnnnnnnnnnnnnnnnnnnnnntgctctcctgttctatttcgtaacgcatcacaaattacatgggctggattctcttttttgaggggtgggggggaggtgccttttttagtggttagggctgacctgcagtaacatgaagatgtagtatgaagatctagtctgtgagcagctctctccacagaagggagaaaggaggaattccaaaagctttccccatttcaagggaagcttgccagaaatcctccaggacccaggagaggctcattttgaaggtaaagacaycagaagggattccatgtggtgccgaacgttccgctgcccctctgtgtattttccaaacctgtcaggtttggttccaaaatgaaagcagggttcggttaattcagagcagttaaagattaacatgacaccacacagggtttgtttttcagaaaagctgtttgtcacaaacaaagtaagtgtacagaatgctacaggtgtaagggcctgttggtgtaaatgcagtaactggccaataaactagcaagtcccgtgtgtctgcagctgggcctggaccgagccagagaggggaatggtgacaa

SEQ ID NO: 94795 - DNA, 600 bp, Chicken  19866894564374_1
ggttctgcactactcaggtctctgtcgaggcactggcctttgtaaacccttcagaaaccgagaaatgagaggtggatcttgcaaactctcactgggtctgaggaccctttcaagaaatttcttttctatattattttatttttattggtacaaaacaatgctttttaagcacttagtcacagatggttccaattcacagaaacacagaaatgctcacatgaaagaccatcactagatgacctactgcctcagaatgcacacgagctttcatcttttcctgaacaggctcctttccctatrttttaactgttaacatcatctgttgctctaagcaattccgcttatcaaaaccctgggtattttgctataaatattaatttcccatctgtccggagttttataactttgcactaattggaggatgtggtggagattcattacggcaacaggaacagtcaatggaggcagagacacaacttcattttacaaagtccacttttttkttgttgttgttgttatagcttgcacaagatacaagactatgatgtaaatattctgaacttccatgaccaggataaaaatctctctacagtattacta

SEQ ID NO: 94796 - DNA, 600 bp, Chicken  19866894564374_2
acagaaatgctcacatgaaagaccatcactagatgacctactgcctcagaatgcacacgagctttcatcttttcctgaacaggctcctttccctatrttttaactgttaacatcatctgttgctctaagcaattccgcttatcaaaaccctgggtattttgctataaatattaatttcccatctgtccggagttttataactttgcactaattggaggatgtggtggagattcattacggcaacaggaacagtcaatggaggcagagacacaacttcattttacaaagtccacttttttkttgttgttgttgttatagcttgcacaagatacaagactatgatgtaaatattctgaacttccatgaccaggataaaaatctctctacagtattactagaaaggcccgtgctgagctgaatttaatacagagcatttaagtagcagtttcttttaaacatctatgcatattaaaaaaggatactttaaaaagaaaaacaaaggtcaaatttcagtggaatgagctgccttaataaaaattaatgatactgagcaataagcaaaagttaatttataatagctaagtttgccaatacattgtt

SEQ ID NO: 94797 - DNA, 600 bp, Chicken  19866894564395_1
ctcccctctcagctgctgttgcacagaggtttttccttttcttaagcctgctctctcagagcacaaccaatgtcacgcacagctcagctccagccagcagcaggtccctgctggagcagctggagctggctgtgatctgacacagggcagctgctgggtgctgctcacagagtccaaccctgcagacctggctaccaaaaccttgccacataagcccagtacagtaagttccatgtcttctaagtgctaactctttttccccattcagagacttcaaacattcaaacagctgacagcttygcagtaatatcagaactggtacagaaactgaatcattcacttccaagacataaatctgagtaaatcagtactcagttctgctgtacagagcctatggactggcagagtaaaactaacattagaatccacagttcataacctacaaatacacaacttctctatacaagtctgrggccaaacagcaaagttcatggaaaaatattcagcaaagataccaaagcattgtaagaaaattaacagctgatgaacagaagcactcaccttcctcaattcaattgtaacttcgtttctgtgtctcct

SEQ ID NO: 94798 - DNA, 600 bp, Chicken  19866894564395_2
tccaaccctgcagacctggctaccaaaaccttgccacataagcccagtacagtaagttccatgtcttctaagtgctaactctttttccccattcagagacttcaaacattcaaacagctgacagcttygcagtaatatcagaactggtacagaaactgaatcattcacttccaagacataaatctgagtaaatcagtactcagttctgctgtacagagcctatggactggcagagtaaaactaacattagaatccacagttcataacctacaaatacacaacttctctatacaagtctgrggccaaacagcaaagttcatggaaaaatattcagcaaagataccaaagcattgtaagaaaattaacagctgatgaacagaagcactcaccttcctcaattcaattgtaacttcgtttctgtgtctcctcatagtctggaagaaaaaaaagaagaaaaaagtttataatataaaggaagtgttgtgtatgttttggaatccattgtttctaggtcaaaagttattcattcaaagatagggaaaacagtgtgcataatttagaactcagtctctcctaataagatgcatgagttggtctgtt

SEQ ID NO: 94799 - DNA, 600 bp, Chicken  19866894564407_1
catcaagctgagaaaaagtagaattaatttttttgttattcctgaactataagctcagaagttctatcacccatctgtcctccaggaatcttcccttcacatccttcccagtacttagctgtatgcactcagtagcacaccattaaactgcactttccactgtgactgtgaagttaaatccatgttttaagctactgaccctctacttttaaccatgaatgctgtgtattaagtacttcaaagaagcatttaaagcaccgttcttctgatacagctaagcagacagcttcccaggtagcraggctttgagttgcaagtcctacagttacacagagggatttttttttccacacctcaaaaatattctatttctgtatctgctactrgttttttctaactcagagttgaacaattagctacagctgagctgagttttgagcaggaaaaagggcctttctgatcttattttttgctgtttatctagcaaaaattacttttagtactttttgtcctctgaaagacaatcaaaggaaggcaaatgtgaaaacattctcaccctgtctaagtacacatataatgagcattaagcccaaaggtcaa

SEQ ID NO: 94800 - DNA, 544 bp, Chicken  19866894564407_2
aatcttcccttcacatccttcccagtacttagctgtatgcactcagtagcacaccattaaactgcactttccactgtgactgtgaagttaaatccatgttttaagctactgaccctctacttttaaccatgaatgctgtgtattaagtacttcaaagaagcatttaaagcaccgttcttctgatacagctaagcagacagcttcccaggtagcraggctttgagttgcaagtcctacagttacacagagggatttttttttccacacctcaaaaatattctatttctgtatctgctactrgttttttctaactcagagttgaacaattagctacagctgagctgagttttgagcaggaaaaagggcctttctgatcttattttttgctgtttatctagcaaaaattacttttagtactttttgtcctctgaaagacaatcaaaggaaggcaaatgtgaaaacattctcaccctgtctaagtacacatataatgagcattaagcccaaaggtcaattcaattctacattcacatcgtggccaaat

SEQ ID NO: 94801 - DNA, 600 bp, Chicken  19866894564414_1
tctgagtcaagagcactttgatttaaaatgatatggttggaaacaccctctttgctaaaatgaaatgaacaaggaaatggccctcatgtaagcttctggggagagactgtctgctcagctcacaggccagtcaaaatatgctttctggcagggagagtaattaacagagcagcttcaatagatggagattcaagggcaagagaccagtgttgttctacaattcttttgggttgaaacttaaatccaattttaatgaggtcatagtagaaaattaatttattttctatcttccaaacaatrtcttctttgttaaacaagaagattggagagttgtgtttctttatttttatttaaataattattgctatatgcttaaaaatgtggaaaactggcctctttcatttcctgaagacaatcatgtgataatcttaagtggaccacttaaacgtattaatctcataaccctgtatgctatggagaattgagaaacctccatactttggatttcttctgggtgggatgtcaagaatgatacgaaaggagtggttctgtagtgaaaatacaaaactgctgagtaacagcaacaggagtacacaggaa

SEQ ID NO: 94802 - DNA, 599 bp, Chicken  19866894564428_1
  misc_feature (1)..(109): n is any nucleotide
nnnnnnnnnnnnnnnnnnnnnnnnnnnnnnnnnnnnnnnnnnnnnnnnnnnnnnnnnnnnnnnnnnnnnnnnnnnnnnnnnnnnnnnnnnnnnnnnnnnnnnnnnnnnnttcagcatgatgcatgggggaaaagactgcatgttaagcaaagatctgtgtgttacgcctgcttagtcatacccagaaacgtgttctgtgggcttagttgtgcagggagcaatttcagacttgtgcaaaggtgccctgggagagcccaaacacttcttgcacctctgtttgaacactgtgtgtatggtctyggtgcttcctatgctttttttcttccttctgcttttagctggagttggctgtgcaagtggggatcaataaggagctgctttaggtctgccctggtgcctctttcttgttgcaaccaaaagytttactcctctacttaaagagtattgcgtttgatgtcgtttccttttttggacttcattttgcctgtttgcaagagcttcctgtgcagcctggctgtggggtgtaactggattctgcaggctgcattagggctttttttgtggttttattgctggcttttttcagagcctctgaatac

SEQ ID NO: 94803 - DNA, 600 bp, Chicken  19866894564428_2
catgggggaaaagactgcatgttaagcaaagatctgtgtgttacgcctgcttagtcatacccagaaacgtgttctgtgggcttagttgtgcagggagcaatttcagacttgtgcaaaggtgccctgggagagcccaaacacttcttgcacctctgtttgaacactgtgtgtatggtctyggtgcttcctatgctttttttcttccttctgcttttagctggagttggctgtgcaagtggggatcaataaggagctgctttaggtctgccctggtgcctctttcttgttgcaaccaaaagytttactcctctacttaaagagtattgcgtttgatgtcgtttccttttttggacttcattttgcctgtttgcaagagcttcctgtgcagcctggctgtggggtgtaactggattctgcaggctgcattagggctttttttgtggttttattgctggcttttttcagagcctctgaatacatccaggttagtgagcctttaaattgtccttcctgccttctagtggctctcaaagccacagtttctttgctcctacctgaagcccaatgttagttaggtcartttactctcagcagctttct

SEQ ID NO: 94804 - DNA, 463 bp, Chicken  19866894564428_3
ttcttgttgcaaccaaaagytttactcctctacttaaagagtattgcgtttgatgtcgtttccttttttggacttcattttgcctgtttgcaagagcttcctgtgcagcctggctgtggggtgtaactggattctgcaggctgcattagggctttttttgtggttttattgctggcttttttcagagcctctgaatacatccaggttagtgagcctttaaattgtccttcctgccttctagtggctctcaaagccacagtttctttgctcctacctgaagcccaatgttagttaggtcartttactctcagcagctttctgctggcttggatggtacaagaagcattgtgagacctgaatgcttcgtaatcccccatggctgttatttccaataactgggaatctgctgctgaacaccaggaggaaagcccaaagcctccacagctggcaattacacttcttc

SEQ ID NO: 94805 - DNA, 600 bp, Chicken  19866894564447_1
cactgggttatgcttgtgctctttgcgatttgctcaagacagttacagctgaaaggttttctcaacaagtgtaaatcctacttgatgtgcctgtgtagtataacccatctgcctaatggtcacagcccgacgcaggctgctgtacagtgttgtttcagggagaagtcctcgattaaacttctaactgaggtaatatttactgttttcacaggaaagcaagtattctgcagctaacagaactcataatcctgcctacaatagctcaaactttcctaaaattgacagatattttacacacaygcgcacacaggttgttctggcccctgtgttttggcagaaaactggaatcaagtgtcacatgtaacaaagctgaygccctacaccatgaaaaygaaacgttctaaagtttttgttttagcaagctagattctaaaygttaacttagctgtgaatcagtttgtagctcatgttgagtttctccctttccttgttccctcatcccaaataatctgctgaattcttccagcaaaacttgagagagaaacgcaatagaattgtactcactgtaagtgatgagctgagactccaacagtgttcaag

SEQ ID NO: 94806 - DNA, 600 bp, Chicken  19866894564447_2
atcctacttgatgtgcctgtgtagtataacccatctgcctaatggtcacagcccgacgcaggctgctgtacagtgttgtttcagggagaagtcctcgattaaacttctaactgaggtaatatttactgttttcacaggaaagcaagtattctgcagctaacagaactcataatcctgcctacaatagctcaaactttcctaaaattgacagatattttacacacaygcgcacacaggttgttctggcccctgtgttttggcagaaaactggaatcaagtgtcacatgtaacaaagctgaygccctacaccatgaaaaygaaacgttctaaagtttttgttttagcaagctagattctaaaygttaacttagctgtgaatcagtttgtagctcatgttgagtttctccctttccttgttccctcatcccaaataatctgctgaattcttccagcaaaacttgagagagaaacgcaatagaattgtactcactgtaagtgatgagctgagactccaacagtgttcaagagaggttacctttatctttgtgttcccttttttgggagggattttgaccgtcacgtaaagttaagcaccttgat

SEQ ID NO: 94807 - DNA, 600 bp, Chicken  19866894564447_3
gtgtagtataacccatctgcctaatggtcacagcccgacgcaggctgctgtacagtgttgtttcagggagaagtcctcgattaaacttctaactgaggtaatatttactgttttcacaggaaagcaagtattctgcagctaacagaactcataatcctgcctacaatagctcaaactttcctaaaattgacagatattttacacacaygcgcacacaggttgttctggcccctgtgttttggcagaaaactggaatcaagtgtcacatgtaacaaagctgaygccctacaccatgaaaaygaaacgttctaaagtttttgttttagcaagctagattctaaaygttaacttagctgtgaatcagtttgtagctcatgttgagtttctccctttccttgttccctcatcccaaataatctgctgaattcttccagcaaaacttgagagagaaacgcaatagaattgtactcactgtaagtgatgagctgagactccaacagtgttcaagagaggttacctttatctttgtgttcccttttttgggagggattttgaccgtcacgtaaagttaagcaccttgattgtgtctcatctacgaac

SEQ ID NO: 94808 - DNA, 600 bp, Chicken  19866894564447_4
gctgctgtacagtgttgtttcagggagaagtcctcgattaaacttctaactgaggtaatatttactgttttcacaggaaagcaagtattctgcagctaacagaactcataatcctgcctacaatagctcaaactttcctaaaattgacagatattttacacacaygcgcacacaggttgttctggcccctgtgttttggcagaaaactggaatcaagtgtcacatgtaacaaagctgaygccctacaccatgaaaaygaaacgttctaaagtttttgttttagcaagctagattctaaaygttaacttagctgtgaatcagtttgtagctcatgttgagtttctccctttccttgttccctcatcccaaataatctgctgaattcttccagcaaaacttgagagagaaacgcaatagaattgtactcactgtaagtgatgagctgagactccaacagtgttcaagagaggttacctttatctttgtgttcccttttttgggagggattttgaccgtcacgtaaagttaagcaccttgattgtgtctcatctacgaactgctgccaagttgcttgtaaactggcactaccttcttattttt

SEQ ID NO: 94809 - DNA, 600 bp, Chicken  19866894564453_1
cttagggtaggaaggagcacaagtatcttgaagaacagtgctggggtctttttccatttctgattcttagaaatgagaaaaaggaatttgcatccccagcagatatgggaacaggactggtgatctctgtttcccagtattctgacgatgactggcaggtgagaattactgtgcatgtaagaagtaaggattcatagtctttcgaaagcaaagtaaattgaaattcttggaagatggagaccaagaaatacatcaccttgcagtctggaataatgaaggctgatatattgataatacagyataattcttttatttaataattacatatggtaccattaaataccaaaatagacactaatattactastgctgcatgccattctgcagtaygtgggcagtactgctgagtgtctgccctcccttagcctcagcaagggtttcctgtgtagcttttcaaccccagaagctaaaagaggaagctggagatgcagttgctaattgtcagacagtgtgctaagtaaagctcatgagagccacctcacatgctggagttagaagaggtgtgtcagatcaagaactggccgcactcaggtacatggg

SEQ ID NO: 94810 - DNA, 600 bp, Chicken  19866894564453_2
tagaaatgagaaaaaggaatttgcatccccagcagatatgggaacaggactggtgatctctgtttcccagtattctgacgatgactggcaggtgagaattactgtgcatgtaagaagtaaggattcatagtctttcgaaagcaaagtaaattgaaattcttggaagatggagaccaagaaatacatcaccttgcagtctggaataatgaaggctgatatattgataatacagyataattcttttatttaataattacatatggtaccattaaataccaaaatagacactaatattactastgctgcatgccattctgcagtaygtgggcagtactgctgagtgtctgccctcccttagcctcagcaagggtttcctgtgtagcttttcaaccccagaagctaaaagaggaagctggagatgcagttgctaattgtcagacagtgtgctaagtaaagctcatgagagccacctcacatgctggagttagaagaggtgtgtcagatcaagaactggccgcactcaggtacatggggtacatggtctgtattccagtgcaagctgaataaagctctctctgtccactttattacataaaggaa

SEQ ID NO: 94811 - DNA, 600 bp, Chicken  19866894564453_3
catccccagcagatatgggaacaggactggtgatctctgtttcccagtattctgacgatgactggcaggtgagaattactgtgcatgtaagaagtaaggattcatagtctttcgaaagcaaagtaaattgaaattcttggaagatggagaccaagaaatacatcaccttgcagtctggaataatgaaggctgatatattgataatacagyataattcttttatttaataattacatatggtaccattaaataccaaaatagacactaatattactastgctgcatgccattctgcagtaygtgggcagtactgctgagtgtctgccctcccttagcctcagcaagggtttcctgtgtagcttttcaaccccagaagctaaaagaggaagctggagatgcagttgctaattgtcagacagtgtgctaagtaaagctcatgagagccacctcacatgctggagttagaagaggtgtgtcagatcaagaactggccgcactcaggtacatggggtacatggtctgtattccagtgcaagctgaataaagctctctctgtccactttattacataaaggaagactgaaataaagagttagtgag

SEQ ID NO: 94812 - DNA, 600 bp, Chicken  19866894564457_1
gggccacagccaagggaacaaaaccatggaaaaggatctttcctacacctgcagaaatgcttgtggcctgtctgaggccatttttctaatgcttcatctccagtaatgggagagttcaggacatagaaccatagaatcattaaggttggaaaagacctctaagaccaccaagcagcagcccatcacaccatgcccactgcccatgtccttcagtgccacatccacacggctctataacaccttcagggacggtgactccacaacctttatggacagcctgtgccactgcctcaccactcyttcggagaagaaatttttcttctgaccttctccagtccttttctgtgaagctgggggcagagtcatgctttgcagacatgctagccttggaatcccacgtggtcctgtgttgttggtatctgacttacccacagccaacagtatgagagtaaactgtgttgcagagcctcttcccattgccagctgtctggggcactatcctaacgttggttattgtcctgttacattttggtggctttcaaaccagagccatcctgaattttatctccagaacaccactatgagctttgcattcacaac

SEQ ID NO: 94813 - DNA, 600 bp, Chicken  19866894564490_1
cttatttcccctttctttgtaatgatagtttcttaaaaccaaatgtcgtttttctccagaacatactgttcatactgcataatcataatggactacatatgcttccataaagtaaattaacactggatgggactagtggcaataaccactccactgagagaaagaataaatatttttagaccatcacttgacagtctaatgctgtatttctagcagtgcgagatgacataggagcaactagcattcagtaattcatctttgaatctatccccatcttggggcctaagcagaacaacactrgtgcatgggataaacccacttgttcccaaatcatcaacaagcaaattctctcataatttgtcttcctgtctgctcctgaccacacctgctctttctcagacacacgaaaaagcacactaataaagaggaggcatacaaatttcaaattccctcaattctcagcagtacttagaagtcagaagagtatgaacaataatgcagagacacaaaacaatatcatcaacaagaccattagctaatgctgtacaatatgtattataagatccaaatccagacagtagtatggtcaatagcatctgc

SEQ ID NO: 94814 - DNA, 600 bp, Chicken  19866894564497_1
actgtgttctttcactgaataggaaagaggtttaagaagctttgaaagttgcccaggagtaactgtgtgcactattattattttaattggtttctatggagagtcaggtctgttgggcaacagatggtatcagtataatagacagagtatggactccatcacctctgataaggtaacacctgtaagtggacaaatcagtaagacttggctcctctcacccctaagcctgctcctacaggcagaagcagcaccaaatatgacaagctcaggcatatacacatgccagcttcaatctagccrgcatgagtaacagcaccagtatcagcatgacaacacaagccctctgcatagctcaggaagtccaccatttcaacagcacagcacaactacacaacctacacyagtgcttatcaaaaactctcctaaccttctwtctaactacatgccattactgtctgggttcaaacrcaagtgtatctacacacacaaagtcccagagtcatgccacaatttggctaggaggggacttcaagaggccccactgtccagcctgctgcttgcagtccccrtataaaaacctctacagcccaacaacttctg

SEQ ID NO: 94815 - DNA, 600 bp, Chicken  19866894564497_2
gtcaggtctgttgggcaacagatggtatcagtataatagacagagtatggactccatcacctctgataaggtaacacctgtaagtggacaaatcagtaagacttggctcctctcacccctaagcctgctcctacaggcagaagcagcaccaaatatgacaagctcaggcatatacacatgccagcttcaatctagccrgcatgagtaacagcaccagtatcagcatgacaacacaagccctctgcatagctcaggaagtccaccatttcaacagcacagcacaactacacaacctacacyagtgcttatcaaaaactctcctaaccttctwtctaactacatgccattactgtctgggttcaaacrcaagtgtatctacacacacaaagtcccagagtcatgccacaatttggctaggaggggacttcaagaggccccactgtccagcctgctgcttgcagtccccrtataaaaacctctacagcccaacaacttctgccagcatacccacaatagctgccatcaagcactctgccaatatggcttacataagcattttcttttttaataaacacagcaaagcagcaaatgtcctggcta

SEQ ID NO: 94816 - DNA, 600 bp, Chicken  19866894564497_3
tataatagacagagtatggactccatcacctctgataaggtaacacctgtaagtggacaaatcagtaagacttggctcctctcacccctaagcctgctcctacaggcagaagcagcaccaaatatgacaagctcaggcatatacacatgccagcttcaatctagccrgcatgagtaacagcaccagtatcagcatgacaacacaagccctctgcatagctcaggaagtccaccatttcaacagcacagcacaactacacaacctacacyagtgcttatcaaaaactctcctaaccttctwtctaactacatgccattactgtctgggttcaaacrcaagtgtatctacacacacaaagtcccagagtcatgccacaatttggctaggaggggacttcaagaggccccactgtccagcctgctgcttgcagtccccrtataaaaacctctacagcccaacaacttctgccagcatacccacaatagctgccatcaagcactctgccaatatggcttacataagcattttcttttttaataaacacagcaaagcagcaaatgtcctggctagattcagctacaggaccggctggctgactca

SEQ ID NO: 94817 - DNA, 600 bp, Chicken  19866894564497_4
taaggtaacacctgtaagtggacaaatcagtaagacttggctcctctcacccctaagcctgctcctacaggcagaagcagcaccaaatatgacaagctcaggcatatacacatgccagcttcaatctagccrgcatgagtaacagcaccagtatcagcatgacaacacaagccctctgcatagctcaggaagtccaccatttcaacagcacagcacaactacacaacctacacyagtgcttatcaaaaactctcctaaccttctwtctaactacatgccattactgtctgggttcaaacrcaagtgtatctacacacacaaagtcccagagtcatgccacaatttggctaggaggggacttcaagaggccccactgtccagcctgctgcttgcagtccccrtataaaaacctctacagcccaacaacttctgccagcatacccacaatagctgccatcaagcactctgccaatatggcttacataagcattttcttttttaataaacacagcaaagcagcaaatgtcctggctagattcagctacaggaccggctggctgactcaccttcctatctatcgctgacccttccatatacctg

SEQ ID NO: 94818 - DNA, 566 bp, Chicken  19866894564497_5
gcatatacacatgccagcttcaatctagccrgcatgagtaacagcaccagtatcagcatgacaacacaagccctctgcatagctcaggaagtccaccatttcaacagcacagcacaactacacaacctacacyagtgcttatcaaaaactctcctaaccttctwtctaactacatgccattactgtctgggttcaaacrcaagtgtatctacacacacaaagtcccagagtcatgccacaatttggctaggaggggacttcaagaggccccactgtccagcctgctgcttgcagtccccrtataaaaacctctacagcccaacaacttctgccagcatacccacaatagctgccatcaagcactctgccaatatggcttacataagcattttcttttttaataaacacagcaaagcagcaaatgtcctggctagattcagctacaggaccggctggctgactcaccttcctatctatcgctgacccttccatatacctggtcaccaaattatgcattcttctttctatcatttctatcattttcctatcggtcttttaaaatacaa

SEQ ID NO: 94819 - DNA, 599 bp, Chicken  19866894564500_1
  misc_feature (1)..(56): n is any nucleotide
nnnnnnnnnnnnnnnnnnnnnnnnnnnnnnnnnnnnnnnnnnnnnnnnnnnnnnnncccctgttctcctgggagacctgtgctgagctggcctcaaggggatttcaaacacatttgactgaagcagtgacatttaaaagctggctccctagggcccttatataaccaaagaagaggcagaacatcactcctggagcttctttagggatctgtaagatagcaagctcgaatgccagctcctctggtattgtttcctttttttttctccactgctttggggcaaattgctctcagtcacgamaaggaggaatcagagcttgcattccacccactgttcaactcttctgcagagagataaaattcatcccaaagccagtccctcggtgccagaaaatggaagcgatccaatgcaaacagcaggacaaataagccagccagcaccagccctctctgtccatccgccttccctccaaaatgaaaagtaagcaactcccagaggtctctcctgctccragcatgtctttgcaattataaattatcccaagactatctctgtccccagcgctgctgtattgacctcctctgtgtttgctgggggga

SEQ ID NO: 94820 - DNA, 600 bp, Chicken  19866894564500_2
aagatagcaagctcgaatgccagctcctctggtattgtttcctttttttttctccactgctttggggcaaattgctctcagtcacgamaaggaggaatcagagcttgcattccacccactgttcaactcttctgcagagagataaaattcatcccaaagccagtccctcggtgccagaaaatggaagcgatccaatgcaaacagcaggacaaataagccagccagcaccagccctctctgtccatccgccttccctccaaaatgaaaagtaagcaactcccagaggtctctcctgctccragcatgtctttgcaattataaattatcccaagactatctctgtccccagcgctgctgtattgacctcctctgtgtttgctggggggattaattgctgctgcattggctgcactgcagaataaaagcttgggacacagcaaattcctaattaccaccatcattcagtggtagcaagagctgataaatttaaagccaaatatgtgaagaaacgttttttcttttaacagtctacaaatctgcaattaaccagcatgaagygctgctgggaaggacatcaagataaataggaccagccactca

SEQ ID NO: 94821 - DNA, 600 bp, Chicken  19866894564500_3
aaaatgaaaagtaagcaactcccagaggtctctcctgctccragcatgtctttgcaattataaattatcccaagactatctctgtccccagcgctgctgtattgacctcctctgtgtttgctggggggattaattgctgctgcattggctgcactgcagaataaaagcttgggacacagcaaattcctaattaccaccatcattcagtggtagcaagagctgataaatttaaagccaaatatgtgaagaaacgttttttcttttaacagtctacaaatctgcaattaaccagcatgaagygctgctgggaaggacatcaagataaataggaccagccactcaaaagacccacaggaagaagggctattagagttgcattgggtaggatagcaatgcctagggcatcatccagatactgctcgcttttaccacgtcctagcatggtggctgacaatgcctggcctagccctgataccttcctgtcccatgcagtcaaatggtctgtaatgtatagctaattgggcaccaccaagatgagagaggctacagtggtgccagcttaygggattctgcacttaaaagaggacaatccccacattc

SEQ ID NO: 94822 - DNA, 600 bp, Chicken  19866894564500_4
taacagtctacaaatctgcaattaaccagcatgaagygctgctgggaaggacatcaagataaataggaccagccactcaaaagacccacaggaagaagggctattagagttgcattgggtaggatagcaatgcctagggcatcatccagatactgctcgcttttaccacgtcctagcatggtggctgacaatgcctggcctagccctgataccttcctgtcccatgcagtcaaatggtctgtaatgtatagctaattgggcaccaccaagatgagagaggctacagtggtgccagcttaygggattctgcacttaaaagaggacaatccccacattcaacctccttccctgatgtaatgmatgttccacatgaagtgtgaaggcagtgatgccagaaaggaggagctcaacagaataatcataaattcatcattctccctgacaggacaagggggaatagtttcaaattaaaacaggaaatttagactggatataagaaaagtgttttatagtaagggtaatgaggcattgaaacatgttgctcagagatgtggtggatgccccatccctagagacatccaagggcaggctgaatggggc

SEQ ID NO: 94823 - DNA, 600 bp, Chicken  19866894564500_5
aaataggaccagccactcaaaagacccacaggaagaagggctattagagttgcattgggtaggatagcaatgcctagggcatcatccagatactgctcgcttttaccacgtcctagcatggtggctgacaatgcctggcctagccctgataccttcctgtcccatgcagtcaaatggtctgtaatgtatagctaattgggcaccaccaagatgagagaggctacagtggtgccagcttaygggattctgcacttaaaagaggacaatccccacattcaacctccttccctgatgtaatgmatgttccacatgaagtgtgaaggcagtgatgccagaaaggaggagctcaacagaataatcataaattcatcattctccctgacaggacaagggggaatagtttcaaattaaaacaggaaatttagactggatataagaaaagtgttttatagtaagggtaatgaggcattgaaacatgttgctcagagatgtggtggatgccccatccctagagacatccaagggcaggctgaatggggctctgagcaccctgatctagccgtaggtgttcctgttcattgcaggggagttgaactagat

SEQ ID NO: 94824 - DNA, 600 bp, Chicken  19866894564502_1
aacagtgcagcaggcactgctcgatgctctttgttcttactgatgcagctcttctcttgtaacatgccgttacactttcctgcccttgcttccttgcttttatttctcctaacacgatgacagtgcctgtttactgaacgaaagcagtctttccctgttttgccttattctagatgctttccttcacagagataatcagattggattactttaatcttattagtagttctgagcgttggttctgaggcctttgtgcgaaggggtgagtgcatgtttgtgtgtgcatccacacgtgcacakctattcctttacacctgcagcagtacatcaaactgaaagcccatctcagtgtgcagcgctggcagtcgcagtgctctgctgtgtctcctgtgctgcaaacagtgtgaacctttaatctgcctcaggaagggagatgatgctctgcagtaccaaaacagccatagggcgacgtcagtacttctttgagtgaacccatgtgagcgcagtgggatttctaatcttacagaatctgctgtgagatcctttctcatttttctctgtaatacatcagattaaatgatcaaacgtattaaaacatca

SEQ ID NO: 94825 - DNA, 600 bp, Chicken  19866894564514_1
ttaagagaggaatcagaaataacaactgacatgagcttttttgcctttgcagcaacttctgacaatattatgagcaatgggttcagtcttgagataaatatgctgttttgtcatgagatgggagcaaagaagcacgaatgataacagtaaatcagtactgctgcattactggtgataagatttctaggagtaagacttggaaacactgatctttagattccttacgaaggatttgtgtttaggagctggtccctaactgtgttggcttttggtggtgacatttggcaaccctaagcattksattgtgttttcagataaatgaacacttaagagattaacattctaaaacaaagccaaagagaargacaattactttactgtttgtatactctcagtgtatcaaccttgaaccaaacagatcctcttcatttttctatggaaatgccctgatatgcttaaaccaagttcatcttaaatgttgttgcacaggatcttatgattggggatagtgttcttagcatcatcagggctgaaagaattagggaaatggcaatacttctgccacaaacctgtttgttggaatgccctttcagacaacat

SEQ ID NO: 94826 - DNA, 600 bp, Chicken  19866894564514_2
taagagaggaatcagaaataacaactgacatgagcttttttgcctttgcagcaacttctgacaatattatgagcaatgggttcagtcttgagataaatatgctgttttgtcatgagatgggagcaaagaagcacgaatgataacagtaaatcagtactgctgcattactggtgataagatttctaggagtaagacttggaaacactgatctttagattccttacgaaggatttgtgtttaggagctggtccctaactgtgttggcttttggtggtgacatttggcaaccctaagcattksattgtgttttcagataaatgaacacttaagagattaacattctaaaacaaagccaaagagaargacaattactttactgtttgtatactctcagtgtatcaaccttgaaccaaacagatcctcttcatttttctatggaaatgccctgatatgcttaaaccaagttcatcttaaatgttgttgcacaggatcttatgattggggatagtgttcttagcatcatcagggctgaaagaattagggaaatggcaatacttctgccacaaacctgtttgttggaatgccctttcagacaacatg

SEQ ID NO: 94827 - DNA, 600 bp, Chicken  19866894564514_3
atattatgagcaatgggttcagtcttgagataaatatgctgttttgtcatgagatgggagcaaagaagcacgaatgataacagtaaatcagtactgctgcattactggtgataagatttctaggagtaagacttggaaacactgatctttagattccttacgaaggatttgtgtttaggagctggtccctaactgtgttggcttttggtggtgacatttggcaaccctaagcattksattgtgttttcagataaatgaacacttaagagattaacattctaaaacaaagccaaagagaargacaattactttactgtttgtatactctcagtgtatcaaccttgaaccaaacagatcctcttcatttttctatggaaatgccctgatatgcttaaaccaagttcatcttaaatgttgttgcacaggatcttatgattggggatagtgttcttagcatcatcagggctgaaagaattagggaaatggcaatacttctgccacaaacctgtttgttggaatgccctttcagacaacatgggataagacgagggccaagcagcagtttgtttgtgtatgtgtacagtattatgattctgaaat

SEQ ID NO: 94828 - DNA, 600 bp, Chicken  19866894564518_1
ctgactgccctctccctgaggctcctgctcttcctcacctgccctctccctgggagatggttcaaaggacgccctcagctttggccagagggcggcctacctcggccaacggggacctgaccaaacaggagtgggcagcctaagttgcttctctgctatacccgggaattgagcatgatcccagctcctgcctggtcagaacaccccagctgcctgttttgctgtggttttggtgtgtgggggggaggggaatcctctcacaactccttgaagcccaacagcacccagctgtctcctackgttgcctawgrgagcccacctgagaggctgcttgttgggagcaggacgagtggcctctatcaggtggggaaaggtttctgcttcacatcttctgaaaaaccaacgtgccctcaccttggtttcacacacacactgtgcataggctctgaaaagcctgccagcacctctgcttccacacagagggtcataaatcactgaatgggccctcagagggcagcctggtaatgcctagagagccgttggctataatttgtcagagtcagtagcagaaggaaagaagaaggaaatttggggctgaaa

SEQ ID NO: 94829 - DNA, 600 bp, Chicken  19866894564518_2
ctctccctgaggctcctgctcttcctcacctgccctctccctgggagatggttcaaaggacgccctcagctttggccagagggcggcctacctcggccaacggggacctgaccaaacaggagtgggcagcctaagttgcttctctgctatacccgggaattgagcatgatcccagctcctgcctggtcagaacaccccagctgcctgttttgctgtggttttggtgtgtgggggggaggggaatcctctcacaactccttgaagcccaacagcacccagctgtctcctackgttgcctawgrgagcccacctgagaggctgcttgttgggagcaggacgagtggcctctatcaggtggggaaaggtttctgcttcacatcttctgaaaaaccaacgtgccctcaccttggtttcacacacacactgtgcataggctctgaaaagcctgccagcacctctgcttccacacagagggtcataaatcactgaatgggccctcagagggcagcctggtaatgcctagagagccgttggctataatttgtcagagtcagtagcagaaggaaagaagaaggaaatttggggctgaaagttatctgc

SEQ ID NO: 94830 - DNA, 600 bp, Chicken  19866894564518_3
ctccctgaggctcctgctcttcctcacctgccctctccctgggagatggttcaaaggacgccctcagctttggccagagggcggcctacctcggccaacggggacctgaccaaacaggagtgggcagcctaagttgcttctctgctatacccgggaattgagcatgatcccagctcctgcctggtcagaacaccccagctgcctgttttgctgtggttttggtgtgtgggggggaggggaatcctctcacaactccttgaagcccaacagcacccagctgtctcctackgttgcctawgrgagcccacctgagaggctgcttgttgggagcaggacgagtggcctctatcaggtggggaaaggtttctgcttcacatcttctgaaaaaccaacgtgccctcaccttggtttcacacacacactgtgcataggctctgaaaagcctgccagcacctctgcttccacacagagggtcataaatcactgaatgggccctcagagggcagcctggtaatgcctagagagccgttggctataatttgtcagagtcagtagcagaaggaaagaagaaggaaatttggggctgaaagttatctgctg

SEQ ID NO: 94831 - DNA, 600 bp, Chicken  19866894564528_1
aggcatctgtatgtaatatagagccgccgtgcagctgggctatagccttgctaccccccttttgttaatcatgaagcagaggtaaatgttttctttggttctccaggggccccaatcactgcaaggcactttgggaagagcctgcagcagcagcagccccaggctggaacagggccgcctcgtgccccacagctaaggacacggctgtcaccctggtctggattttaggcaggacacaccaggagagaagctgcgtccccaggcagggcgatgggatggtctgcagcaccccggcatccrtgcagcaacctccttccttgtcctcrgagcatctcaagcatgcccctgccattgccctctgctcaggaggcaaaagggggcacagggatggagagggacggaactgagcttctaaaaaggggatgaaatgcctctgaggcagaaaggaacagtgaaaaactctgccactgccagccctaatactccaggctcggcttgaaagctacacaggaaacgtagcaggcaaagaggaggcagcttgaggaattcctacccatcaagctttattgtgttattccaactaagcagagacaaaaagac

SEQ ID NO: 94832 - DNA, 600 bp, Chicken  19866894564528_2
ccgtgcagctgggctatagccttgctaccccccttttgttaatcatgaagcagaggtaaatgttttctttggttctccaggggccccaatcactgcaaggcactttgggaagagcctgcagcagcagcagccccaggctggaacagggccgcctcgtgccccacagctaaggacacggctgtcaccctggtctggattttaggcaggacacaccaggagagaagctgcgtccccaggcagggcgatgggatggtctgcagcaccccggcatccrtgcagcaacctccttccttgtcctcrgagcatctcaagcatgcccctgccattgccctctgctcaggaggcaaaagggggcacagggatggagagggacggaactgagcttctaaaaaggggatgaaatgcctctgaggcagaaaggaacagtgaaaaactctgccactgccagccctaatactccaggctcggcttgaaagctacacaggaaacgtagcaggcaaagaggaggcagcttgaggaattcctacccatcaagctttattgtgttattccaactaagcagagacaaaaagacaaatctcagctccctactttcattta

SEQ ID NO: 94833 - DNA, 600 bp, Chicken  19866894564531_1
tggtagaaatgaaatgttttaaaataaattacataagattgtgtgagcctgtaatatcacataataaatttatgtccgtatcatttcagtacagtatactatgatggtttaacagaactgtggtatctcggtaacgtcctttttctttttttccacctctgaagctgcaacctcaaagtcagggcaagctatattaaattgtctgtttctgccactgcatttaaaaaaaaaaaaaaaagaatagaaattttctcatgataaaacagatttactataagatgagtattactttcctttatrtttattcttttagtttctgggacatgtaacagtgtaggacatgattttggatgcaaatttgatgctttcaaacatttgctcagtcagaatgcttttaaatatgtgctttgtgtgtmataatagatgtacttaggagaacgtaattctgctgttgataacattgctggtggtatcactctgagcacataattttacccttgttttctgtgatttacgaaagaatatcccagtagcrctgcatatatgactgtcttctaagaaatactgatagaatttaaacttcttgttaataagccctag

SEQ ID NO: 94834 - DNA, 600 bp, Chicken  19866894564531_2
actgtggtatctcggtaacgtcctttttctttttttccacctctgaagctgcaacctcaaagtcagggcaagctatattaaattgtctgtttctgccactgcatttaaaaaaaaaaaaaaaagaatagaaattttctcatgataaaacagatttactataagatgagtattactttcctttatrtttattcttttagtttctgggacatgtaacagtgtaggacatgattttggatgcaaatttgatgctttcaaacatttgctcagtcagaatgcttttaaatatgtgctttgtgtgtmataatagatgtacttaggagaacgtaattctgctgttgataacattgctggtggtatcactctgagcacataattttacccttgttttctgtgatttacgaaagaatatcccagtagcrctgcatatatgactgtcttctaagaaatactgatagaatttaaacttcttgttaataagccctaggaaatggcttttaactgggatacgtgatcctacaaatgaaagtgataagaaccccagcctcacacaactgtattaaatgagaattgctttaagtaatgtgagtgcttttcgaaata

SEQ ID NO: 94835 - DNA, 600 bp, Chicken  19866894564531_3
aaagaatagaaattttctcatgataaaacagatttactataagatgagtattactttcctttatrtttattcttttagtttctgggacatgtaacagtgtaggacatgattttggatgcaaatttgatgctttcaaacatttgctcagtcagaatgcttttaaatatgtgctttgtgtgtmataatagatgtacttaggagaacgtaattctgctgttgataacattgctggtggtatcactctgagcacataattttacccttgttttctgtgatttacgaaagaatatcccagtagcrctgcatatatgactgtcttctaagaaatactgatagaatttaaacttcttgttaataagccctaggaaatggcttttaactgggatacgtgatcctacaaatgaaagtgataagaaccccagcctcacacaactgtattaaatgagaattgctttaagtaatgtgagtgcttttcgaaataggggataacagagttgtgctgggagagtccccacactcatcagcacatgtgataattcttagttgcacttagaagatctcattgaggattctttggctctacgatttcaatgtaaattt

SEQ ID NO: 94836 - DNA, 579 bp, Chicken  19866894564543_1
aggtctttctagagttgtattttaatgcagtacactctcctgtctcagagtaaaaaatgtttggctcagtaggatctggatcacactgtcactatacacaactttaatcacaccactggctgagtctctgtcatgattgataagacacacaggttttcttctatagtcacctctggtttattaatctccacttaggagtttttgcttgtcctcataagcatagcggctaccccaagaaaaatgtagttattaaggctccatttttctctttaatctttataaccttgttaacagaggcastgtcagtctagcttggtctctccctgtagcagaggagcaaagatactcttagaagttgtgccaggtattgctattaatattattactgtgcattgcctccaaggggtttttaccagatttacagatagatctctgatgctgcatagtaccaaacaaggtagggagagttctaattgggggagaaaagccattgtatagcatcatatgtgaccagcttcctatggttaagccaacacttactgacctaacaggattattttttattagtagtattttttt

SEQ ID NO: 94837 - DNA, 599 bp, Chicken  19866894564554_1
  misc_feature (1)..(5): n is any nucleotide
nnnnncagccctgggagggtggctactttggggtgggtggctgctgtgggatgacacgtgtccctcacctgcttcctcttggactcagctttacaacattgctgcgacatcacggagtttccgagactacaaggtgcagtttgtcccgttccacacagacctcggctatcggcacaagtacatctacaggagtccagagctacctcgaatactgcggtaacagcccagctaaccggggtctcttctagcattggggggggagggcagttgtgcctcgggctctggatcagcactgtgacrcatgccctgggagagatgcatagcaggtgcctgcattgggcagcttttatgaaagcccttttgtcttccagagtggctgaggcactggtgctggctgagcacaaaggcagagttctctatctctgcagaataagttaaaacttaytgtggaaggggaaccacagaaagctgcgagtgctctcccctgtctcatctctgctgcaggggctgtttgcagggcaaacgttcacctcttctagtgggagccactgatgcatgaaagcaaagctcactgctgttttctgtagctgtgagtgctt

SEQ ID NO: 94838 - DNA, 600 bp, Chicken  19866894564554_2
ccgttccacacagacctcggctatcggcacaagtacatctacaggagtccagagctacctcgaatactgcggtaacagcccagctaaccggggtctcttctagcattggggggggagggcagttgtgcctcgggctctggatcagcactgtgacrcatgccctgggagagatgcatagcaggtgcctgcattgggcagcttttatgaaagcccttttgtcttccagagtggctgaggcactggtgctggctgagcacaaaggcagagttctctatctctgcagaataagttaaaacttaytgtggaaggggaaccacagaaagctgcgagtgctctcccctgtctcatctctgctgcaggggctgtttgcagggcaaacgttcacctcttctagtgggagccactgatgcatgaaagcaaagctcactgctgttttctgtagctgtgagtgcttgagccctagtatttgtcagggaaatggaagacctgcgggctgcagcatccaccagagtgcaggacagctgagagtcactggtgtgttctttcttttcctagggaattcctgggaatacctgaacatgagcatcatcactgaagact

SEQ ID NO: 94839 - DNA, 600 bp, Chicken  19866894564562_1
gattattcctgatttagtgggcactcatagcactctaaaaagacaaggtttcttagattatattctatgaaagaagtgatgcattgcatttctgaggaggacgtgttccatgggctcagtgttctgttcttaagagtcttattcaggcgtacacaagacagtagtacctgcatgtaaaactcaccttgttggcatgcgagaggactgcagaaattaggatccccttcaataaagtcatttccttttaagcatgtgcatttaaaatacagggaataaaagactaggtttaaatagcggagytgtttgttggtaagagttatcccctcatcttatgtgtactgtcagaatcttttttattaatgttttctatcagatgagtgaaaaaggcagaacacttacgcacatcccactattcttgctattgactgagaggtattttcataaacctctgtaatagagcacttatttactagtatcaggtttctttggcattttatcacctttgtttagtaacttacagctttgtgtctcttgggcaactaattactgctaacgatctgaatttctatgcttgcagagtcatcagttctagcgtgcagt

SEQ ID NO: 94840 - DNA, 600 bp, Chicken  19866894564564_1
tgaggggagccaggtaaatagtgaatgcagcaggtgggagaaagcgctgtggcatttgtgagccgacaacagaaagccgacatccaggagagaaccaaccaagagcaaagaaagaaggtgcacgctctgcacaaagatccactgctgcaggagagcactgcgctcaggtgctgctgtgccttccgagctccgcgttctgtcccagcagtgtctgctcagtgcctgctcatacacacagcctctgcgggatgtggcaaatgtaaatagaattacctctgaaatgaaagagtctctatttgygtaatgtgcggtagctgtttgaaatactttcaacgtctgtgtttatttgattccaactcgacacggcaattactaagagcagcatttaaacggctgaaacctttgcgagagagactgcatacatctccatttctttagacaaaacaacagcgtaatctttccaagtgctggaacatctgaacttgaatttccatcctaaaaagtccaattattcccttctgatatgcgcgaagctttcctaaggagaagccattggcaaaaggctctcagaaaacaaagtctccgaaatccgttggttgt

SEQ ID NO: 94841 - DNA, 600 bp, Chicken  19866894564564_2
tcctaaaaagtccaattattcccttctgatatgcgcgaagctttcctaaggagaagccattggcaaaaggctctcagaaaacaaagtctccgaaatccgttggttgtttttgctgagtgcgcccaccgcagctctcagtgcagcccgaggggctccggggccaaacactgctgcggtggttggtcgtcctctgctcttaaagtgtagcagtgctgcattctttcaccaccactcagagttgaatcatacatacactgtatcacttcaacaacaaccaaaaaaaagcctatttaaagagtraaagaygtctggtgttgcgattttgttttgtcttttcaactgagcttgaaggaacaggagctcagtacacatacaatgctatgccaggtttctgggttggcttttttttttcgttctcccttttcaatgacacttaacagtctgcatcgtatttcacaggggcaaataatccaytgcgtccccaaatgcacttccattatcttcccaaatgcacctcccaagtaccttcctcstacaacagaaagaacagcaacccccaagttagtggggatgccccacgagccgatcgattccttcaag

SEQ ID NO: 94842 - DNA, 600 bp, Chicken  19866894564564_3
aaagtccaattattcccttctgatatgcgcgaagctttcctaaggagaagccattggcaaaaggctctcagaaaacaaagtctccgaaatccgttggttgtttttgctgagtgcgcccaccgcagctctcagtgcagcccgaggggctccggggccaaacactgctgcggtggttggtcgtcctctgctcttaaagtgtagcagtgctgcattctttcaccaccactcagagttgaatcatacatacactgtatcacttcaacaacaaccaaaaaaaagcctatttaaagagtraaagaygtctggtgttgcgattttgttttgtcttttcaactgagcttgaaggaacaggagctcagtacacatacaatgctatgccaggtttctgggttggcttttttttttcgttctcccttttcaatgacacttaacagtctgcatcgtatttcacaggggcaaataatccaytgcgtccccaaatgcacttccattatcttcccaaatgcacctcccaagtaccttcctcstacaacagaaagaacagcaacccccaagttagtggggatgccccacgagccgatcgattccttcaagctacaa

SEQ ID NO: 94843 - DNA, 600 bp, Chicken  19866894564564_4
ggtggttggtcgtcctctgctcttaaagtgtagcagtgctgcattctttcaccaccactcagagttgaatcatacatacactgtatcacttcaacaacaaccaaaaaaaagcctatttaaagagtraaagaygtctggtgttgcgattttgttttgtcttttcaactgagcttgaaggaacaggagctcagtacacatacaatgctatgccaggtttctgggttggcttttttttttcgttctcccttttcaatgacacttaacagtctgcatcgtatttcacaggggcaaataatccaytgcgtccccaaatgcacttccattatcttcccaaatgcacctcccaagtaccttcctcstacaacagaaagaacagcaacccccaagttagtggggatgccccacgagccgatcgattccttcaagctacaagagctaaacagaggcagagaatcacactctgaccccttcaaaaacatccaagtgccaaaatatcagtcctgaatcctccctgcaatgcaacctttggtcattacactacagtgtgaataattattcatcatctgtaccgaaatgacaaattatttattgatttttctc

SEQ ID NO: 94844 - DNA, 600 bp, Chicken  19866894564564_5
cagagttgaatcatacatacactgtatcacttcaacaacaaccaaaaaaaagcctatttaaagagtraaagaygtctggtgttgcgattttgttttgtcttttcaactgagcttgaaggaacaggagctcagtacacatacaatgctatgccaggtttctgggttggcttttttttttcgttctcccttttcaatgacacttaacagtctgcatcgtatttcacaggggcaaataatccaytgcgtccccaaatgcacttccattatcttcccaaatgcacctcccaagtaccttcctcstacaacagaaagaacagcaacccccaagttagtggggatgccccacgagccgatcgattccttcaagctacaagagctaaacagaggcagagaatcacactctgaccccttcaaaaacatccaagtgccaaaatatcagtcctgaatcctccctgcaatgcaacctttggtcattacactacagtgtgaataattattcatcatctgtaccgaaatgacaaattatttattgatttttctctaatattatcaacttctaaaggatgattactggtgtaatagttagccaagttgttataa

SEQ ID NO: 94845 - DNA, 600 bp, Chicken  19866894564565_1
gagcagtgtcactttttgctgtggcagtgaccgtggggtggttgatggctcccgtgctcagccctgcaccgtgcacagctctggtgctgcttcctgacccccctcggcgctgggagcgctgcgaatttaaaagcaaacttggcacgagcacagtgcgggaggacactgcagggctaataaacatcccagagcaaaacccttgcaggccccttaatcaagctcaataataccaaacggaggacactaatcccacggccagagccttttattaaacaaaaggtacccggagctccccgcgcygctctgcgagacgcatcctttcctgccaggtcttgcgcagcaccgatccttctgtctcaatatcagctctaaattgctgccgtctggagcgacctcttcgccaaaatatgaggaaatgagagagagggttttttttgttgttgttgtttttctttttttgcatctctgctgatttttatctctgccgcttggcaaagcggctgcatgggtttcgctttcctccttcccagctgtgccgrtcccttgtgctccccggcgtatctygcccaggctgggatggctcagtggcatttctgcgtc

SEQ ID NO: 94846 - DNA, 600 bp, Chicken  19866894564565_2
gacactaatcccacggccagagccttttattaaacaaaaggtacccggagctccccgcgcygctctgcgagacgcatcctttcctgccaggtcttgcgcagcaccgatccttctgtctcaatatcagctctaaattgctgccgtctggagcgacctcttcgccaaaatatgaggaaatgagagagagggttttttttgttgttgttgtttttctttttttgcatctctgctgatttttatctctgccgcttggcaaagcggctgcatgggtttcgctttcctccttcccagctgtgccgrtcccttgtgctccccggcgtatctygcccaggctgggatggctcagtggcatttctgcgtccccatcccatgtgtgtgcctggcagggttgaggtcgccgccgccgtgggtggccccgctgcaggcagggacacaggtgctgccttttggagcccatttttgagctgagcatctgcagagcatcatcagcacagggagggccgtgtgggttctgcatcccaaggtcagctttgtggatgctgcctgcatgctcccttcactcaggttttggagtgaagagaaggggtgagagggtgggag

SEQ ID NO: 94847 - DNA, 600 bp, Chicken  19866894564565_3
tttattaaacaaaaggtacccggagctccccgcgcygctctgcgagacgcatcctttcctgccaggtcttgcgcagcaccgatccttctgtctcaatatcagctctaaattgctgccgtctggagcgacctcttcgccaaaatatgaggaaatgagagagagggttttttttgttgttgttgtttttctttttttgcatctctgctgatttttatctctgccgcttggcaaagcggctgcatgggtttcgctttcctccttcccagctgtgccgrtcccttgtgctccccggcgtatctygcccaggctgggatggctcagtggcatttctgcgtccccatcccatgtgtgtgcctggcagggttgaggtcgccgccgccgtgggtggccccgctgcaggcagggacacaggtgctgccttttggagcccatttttgagctgagcatctgcagagcatcatcagcacagggagggccgtgtgggttctgcatcccaaggtcagctttgtggatgctgcctgcatgctcccttcactcaggttttggagtgaagagaaggggtgagagggtgggagctgatccctgggttgtgagcccaga

SEQ ID NO: 94848 - DNA, 600 bp, Chicken  19866894564569_1
gcaatgtataattcaataataaaataatgatagttgtctctttactagttttctggtataactttttattgtcgtatttttttgagaaatctcaagtactgtttttggttagcttaatgaatttgggatttagagtaggaatctaaactacttcagaggaggacaaaaagtagaagaaggaataatattgatttgatgatagattgtataaaaactatgtaatttatttaatatctgtaattctgatccctctgtcacttgcttttaggagatacaagtctgatatcaagggaaaaaaawtaaatggcatataattccttcgcttgaattatttgtgggttttgttctctgttttgtcatgaagtatacacataaaaacatttcagctttaacaactgtaatatcagttttccacatttgcttagataagattcatgatatttcaagatgtaatttatttgatttatttgaacttatttaaaagcagtaaaacatatatttcatttgattacctctaaataaatgatctgtttttccttctgtctgtttgagcaaatatatagttttatgtagtgtttgtcgtagaaagatttgaatcct

SEQ ID NO: 94849 - DNA, 600 bp, Chicken  19866894564572_1
gtacttgagatgagactttctccactccaccattcctatggcctcctcctgcactggaagattaggtgcaatgctggggtttgctcacaagtggatctagagaatgcaaattgtcctgggaacgtgggagaggagcaacgagaaagaaaggaaaccccagaaatgtgaacacttttggagaagaccaccaggaattcccccatcctacagaagcacaccagctgacatcagtgttattacggatgtgtcatagagtctgacagatgtccttctcacctctgaccgtggaattgaacccayagaagacaagaarttgtctgtgagcatcttctgtggatcccagcactctggtggagtatcccaaatatcagttccctaagaggttaatgtgccattaaacttgccacttgccagaaactgtagaagagagattttctttgagatcatacaaatgaagcctttaaaagttttaggagctgtaagtgctcactttgaaaggctgagatgattctgctaattctgtggtgaaaaaggcagatgttgcccaggatcctacttggggtgacccagcagttggtttcatgagagtaattcttacag

SEQ ID NO: 94850 - DNA, 600 bp, Chicken  19866894564572_2
gactttctccactccaccattcctatggcctcctcctgcactggaagattaggtgcaatgctggggtttgctcacaagtggatctagagaatgcaaattgtcctgggaacgtgggagaggagcaacgagaaagaaaggaaaccccagaaatgtgaacacttttggagaagaccaccaggaattcccccatcctacagaagcacaccagctgacatcagtgttattacggatgtgtcatagagtctgacagatgtccttctcacctctgaccgtggaattgaacccayagaagacaagaarttgtctgtgagcatcttctgtggatcccagcactctggtggagtatcccaaatatcagttccctaagaggttaatgtgccattaaacttgccacttgccagaaactgtagaagagagattttctttgagatcatacaaatgaagcctttaaaagttttaggagctgtaagtgctcactttgaaaggctgagatgattctgctaattctgtggtgaaaaaggcagatgttgcccaggatcctacttggggtgacccagcagttggtttcatgagagtaattcttacaggagattctgcaga

SEQ ID NO: 94851 - DNA, 599 bp, Chicken  19866894564573_1
  misc_feature (1)..(108): n is any nucleotide
nnnnnnnnnnnnnnnnnnnnnnnnnnnnnnnnnnnnnnnnnnnnnnnnnnnnnnnnnnnnnnnnnnnnnnnnnnnnnnnnnnnnnnnnnnnnnnnnnnnnnnnnnnnngggcaccccatacccgccccatgggtgcagagagaccccccatccccacgcccacccccagccctacgcccaccccataaccccgcacccaccccgtagccccctagatgggctcagctcacagctccaccccccatccccgctctgtgcttctccccctccaaccccatctcccggcagagcttaaagccsagggccgtggaccgcagcccgtacctgggggacgtggcagcagtggtccacgcggggaaaaaagagacggggacacccctggccgatacgcccacccggcccgccacgcgccacgggggcatgagggacctgcacgagtccagcttcagcctgtccggtaagaggggcccggcacccccagggcacccccagggcacccccagggccaccccaatgtaccccaggggcaacctgggcttcccgatgcctccccggccaccccacgccaccaacctggagcatcccagtacaacccagta

SEQ ID NO: 94852 - DNA, 600 bp, Chicken  19866894564601_1
gcaataacttcaatttgttctccacacagatttttttattcagaaaatggctttgaaataaaatgctttggaaggctggcaagcctgctgaataatgagttgttactctctggaagaacattaccttaaaaattacaagaaattctgagtgttttaatgagtggaactcttacttttgagagaaaataaatggaagagtttgagagggtatttttgttattttttctcctgaggctgcctgttgctcttatgtggaattttcctgctgatttgacttcttattctgctgtgagactgacrctcagatttacatgattgctttggagaggagctagatttagcrtaaggaagataactgctttttccctagggagagacagaaaagggaaggacagagtggagcacacagacaatatcatctgcagctacattcttcggtcaattattttattcagcctctattttagattatgctgtatctaataaaagactggatagctactgttctcaagccagtccagataagcaactacaggtaaacaggatcacagataagcaaataaactatttgtgttataatgctaacgtccaactgtaaca

SEQ ID NO: 94853 - DNA, 600 bp, Chicken  19866894564601_2
aaaatggctttgaaataaaatgctttggaaggctggcaagcctgctgaataatgagttgttactctctggaagaacattaccttaaaaattacaagaaattctgagtgttttaatgagtggaactcttacttttgagagaaaataaatggaagagtttgagagggtatttttgttattttttctcctgaggctgcctgttgctcttatgtggaattttcctgctgatttgacttcttattctgctgtgagactgacrctcagatttacatgattgctttggagaggagctagatttagcrtaaggaagataactgctttttccctagggagagacagaaaagggaaggacagagtggagcacacagacaatatcatctgcagctacattcttcggtcaattattttattcagcctctattttagattatgctgtatctaataaaagactggatagctactgttctcaagccagtccagataagcaactacaggtaaacaggatcacagataagcaaataaactatttgtgttataatgctaacgtccaactgtaacaatatactgtttgtgtatagagttgtccatggtgcatcttgtaa

SEQ ID NO: 94854 - DNA, 599 bp, Chicken  19866894564604_1
  misc_feature (1)..(118): n is any nucleotide
nnnnnnnnnnnnnnnnnnnnnnnnnnnnnnnnnnnnnnnnnnnnnnnnnnnnnnnnnnnnnnnnnnnnnnnnnnnnnnnnnnnnnnnnnnnnnnnnnnnnnnnnnnnnnnnnnnnnnnctggccctgcccggcagcactgacacccccagccccatcgccgtcagctctgccgtgagcatctgagcagcgctgcccccggggctgttgctctgtgccacaactgaaggctttgcccatgaagcactgcagcagcagaacgagaactccgttgttggggaggtgcctttctcagagctgakgtgtgcagttygatgccatggagactgctctgtgccacagtgtcaccgatggcaccgcggaggggattgctgtgctgtgcctgcaggggctgccttcacccagcaccactgtgctgcaccgggtrtgggtcgggcarcagacccagcatgtggggcaggcagtgggctgtgggtgcagcagtgccgtgccacacatcccggtctgtgtgccttgagaggccgcagcgctccgtgcagccaatctcaaggagtgcatgcagtcaggagatgaggctgcccagctccggggctgtgggctg

SEQ ID NO: 94855 - DNA, 599 bp, Chicken  19866894564604_2
  misc_feature (1)..(107): n is any nucleotide
nnnnnnnnnnnnnnnnnnnnnnnnnnnnnnnnnnnnnnnnnnnnnnnnnnnnnnnnnnnnnnnnnnnnnnnnnnnnnnnnnnnnnnnnnnnnnnnnnnnnnnnnnnnctggccctgcccggcagcactgacacccccagccccatcgccgtcagctctgccgtgagcatctgagcagcgctgcccccggggctgttgctctgtgccacaactgaaggctttgcccatgaagcactgcagcagcagaacgagaactccgttgttggggaggtgcctttctcagagctgakgtgtgcagttygatgccatggagactgctctgtgccacagtgtcaccgatggcaccgcggaggggattgctgtgctgtgcctgcaggggctgccttcacccagcaccactgtgctgcaccgggtrtgggtcgggcarcagacccagcatgtggggcaggcagtgggctgtgggtgcagcagtgccgtgccacacatcccggtctgtgtgccttgagaggccgcagcgctccgtgcagccaatctcaaggagtgcatgcagtcaggagatgaggctgcccagctccggggctgtgggctgagcccctcagc

SEQ ID NO: 94856 - DNA, 600 bp, Chicken  19866894564604_3
tgcccggcagcactgacacccccagccccatcgccgtcagctctgccgtgagcatctgagcagcgctgcccccggggctgttgctctgtgccacaactgaaggctttgcccatgaagcactgcagcagcagaacgagaactccgttgttggggaggtgcctttctcagagctgakgtgtgcagttygatgccatggagactgctctgtgccacagtgtcaccgatggcaccgcggaggggattgctgtgctgtgcctgcaggggctgccttcacccagcaccactgtgctgcaccgggtrtgggtcgggcarcagacccagcatgtggggcaggcagtgggctgtgggtgcagcagtgccgtgccacacatcccggtctgtgtgccttgagaggccgcagcgctccgtgcagccaatctcaaggagtgcatgcagtcaggagatgaggctgcccagctccggggctgtgggctgagcccctcagcagcgcagggctgagtggccggggcaggtcctgctgggcagtgccatccctgggcccgcagtgctggttgcagtgcagcggcacagaggaagcagtgctcctttgctgcggttcca

SEQ ID NO: 94857 - DNA, 600 bp, Chicken  19866894564604_4
ctgacacccccagccccatcgccgtcagctctgccgtgagcatctgagcagcgctgcccccggggctgttgctctgtgccacaactgaaggctttgcccatgaagcactgcagcagcagaacgagaactccgttgttggggaggtgcctttctcagagctgakgtgtgcagttygatgccatggagactgctctgtgccacagtgtcaccgatggcaccgcggaggggattgctgtgctgtgcctgcaggggctgccttcacccagcaccactgtgctgcaccgggtrtgggtcgggcarcagacccagcatgtggggcaggcagtgggctgtgggtgcagcagtgccgtgccacacatcccggtctgtgtgccttgagaggccgcagcgctccgtgcagccaatctcaaggagtgcatgcagtcaggagatgaggctgcccagctccggggctgtgggctgagcccctcagcagcgcagggctgagtggccggggcaggtcctgctgggcagtgccatccctgggcccgcagtgctggttgcagtgcagcggcacagaggaagcagtgctcctttgctgcggttccatcgtgctcccct

SEQ ID NO: 94858 - DNA, 599 bp, Chicken  19866894564608_1
  misc_feature (1)..(9): n is any nucleotide
nnnnnnnnnacactaacagaattaattgaaatcatctcatggctattagcaatttctcagaaattttagagagtagtggaatttccataataattagaagggaaaaatccagtctctgtcttaaaaaggtgaaaaagaggagataaggaatgacaaacttgtccgattaattgcagtccatggaaaattctttagaaaaacaagagcgacaagagttttgtcttttctacagcaatgaaataaatacctgccaatacaggtctatcataagcaacacctgacaagcaaattcaatttccycttcaatagggaaatactttgcgactggttatgaagtggcacatgatatattttgaccttggtgagacttaacaatgtctgaaagaacattcccataaagagaagctaaagaaacaaggactrgatgaactatttcaaggtaaatacagaacatgttccaagattttatgtatagactagtaataaaggaacaatatcaagaatggggctcaatagtggtcaattctggtctggtgcactatgtgtttgctttcataatttgtatggtgaagcagtaaaactacaaaactgctaacgtt

SEQ ID NO: 94859 - DNA, 600 bp, Chicken  19866894564608_2
aaaaggtgaaaaagaggagataaggaatgacaaacttgtccgattaattgcagtccatggaaaattctttagaaaaacaagagcgacaagagttttgtcttttctacagcaatgaaataaatacctgccaatacaggtctatcataagcaacacctgacaagcaaattcaatttccycttcaatagggaaatactttgcgactggttatgaagtggcacatgatatattttgaccttggtgagacttaacaatgtctgaaagaacattcccataaagagaagctaaagaaacaaggactrgatgaactatttcaaggtaaatacagaacatgttccaagattttatgtatagactagtaataaaggaacaatatcaagaatggggctcaatagtggtcaattctggtctggtgcactatgtgtttgctttcataatttgtatggtgaagcagtaaaactacaaaactgctaacgttcacggtcatcagaaaaggactactaaccccatggaggatggcattataattgaaaatgatactggaaaactatgttggagaaaaactggatgaacttcagaaagtcccatgaagtttttcattt

SEQ ID NO: 94860 - DNA, 548 bp, Chicken  19866894564617_1
cctttctttcttacagcccccctttagatactgaaagggtagcctgtgttgagatactgaaaggatggtgggcagggagttgggcaatatggaatgactctcaccccgttccctctgtggccccagttttatcatgcctgtgaccagccaggcatcgtggtgttctgcatcatggactatgacgtgctgcagttctgtgacttcctgggttccctcatgtctgtctgggtcactgtcatcgccatggcccggctgcagcccgtggtcaagcaggtgagtgcagagagagtgcatgtgggrgggggagggatcctggagtggaggtccaacctgatgtccctctcaccaccccacaggtgctgtaccttctgggggccatgctgctctccatggcactacagatggaccgccatgggctatggaacctgctgggacccagcctctttgccttgggcatcatggccattgcttgggtaaggtcccattgcatccccttcctgttgtatcacccgtccccatgcttagccctccccagcttgccaccacgg

SEQ ID NO: 94861 - DNA, 599 bp, Chicken  19866894564619_1
  misc_feature (1)..(187): n is any nucleotide
nnnnnnnnnnnnnnnnnnnnnnnnnnnnnnnnnnnnnnnnnnnnnnnnnnnnnnnnnnnnnnnnnnnnnnnnnnnnnnnnnnnnnnnnnnnnnnnnnnnnnnnnnnnnnnnnnnnnnnnnnnnnnnnnnnnnnnnnnnnnnnnnnnnnnnnnnnnnnnnnnnnnnnnnnnnnnnnnnnnnnnnnnnncctgcaactagagcaaagcttcagcctgtaaccccctcggctccttggctgttgttgcattatgttgagctctctcccttgtaacttagcatatcatttgctgttactgaacygcaggtcaaatgcagacagcttrcagtgaagtcagttgctgcacttctgggaattggtaccaccagctgcctgtcattcrtgactgcctgcaccaagacagagatggaccccatctcgatgtccctaagcacagcaagctgtgacctgagctagacttctccactggtgatcagtagtgttctctgctcacacagtttagtctgtactattcatgaagccatgatgtgagacatagccacgtgtcctgaccttctatctcagcatctgtgatgggtgagggtgagtgggtaagataggc

SEQ ID NO: 94862 - DNA, 599 bp, Chicken  19866894564619_2
  misc_feature (1)..(164): n is any nucleotide
nnnnnnnnnnnnnnnnnnnnnnnnnnnnnnnnnnnnnnnnnnnnnnnnnnnnnnnnnnnnnnnnnnnnnnnnnnnnnnnnnnnnnnnnnnnnnnnnnnnnnnnnnnnnnnnnnnnnnnnnnnnnnnnnnnnnnnnnnnnnnnnnnnnnnnnnnnnnnnnnnnnncctgcaactagagcaaagcttcagcctgtaaccccctcggctccttggctgttgttgcattatgttgagctctctcccttgtaacttagcatatcatttgctgttactgaacygcaggtcaaatgcagacagcttrcagtgaagtcagttgctgcacttctgggaattggtaccaccagctgcctgtcattcrtgactgcctgcaccaagacagagatggaccccatctcgatgtccctaagcacagcaagctgtgacctgagctagacttctccactggtgatcagtagtgttctctgctcacacagtttagtctgtactattcatgaagccatgatgtgagacatagccacgtgtcctgaccttctatctcagcatctgtgatgggtgagggtgagtgggtaagataggctggagagcaagcgtgcagggctt

SEQ ID NO: 94863 - DNA, 599 bp, Chicken  19866894564619_3
  misc_feature (1)..(107): n is any nucleotide
nnnnnnnnnnnnnnnnnnnnnnnnnnnnnnnnnnnnnnnnnnnnnnnnnnnnnnnnnnnnnnnnnnnnnnnnnnnnnnnnnnnnnnnnnnnnnnnnnnnnnnnnnnncctgcaactagagcaaagcttcagcctgtaaccccctcggctccttggctgttgttgcattatgttgagctctctcccttgtaacttagcatatcatttgctgttactgaacygcaggtcaaatgcagacagcttrcagtgaagtcagttgctgcacttctgggaattggtaccaccagctgcctgtcattcrtgactgcctgcaccaagacagagatggaccccatctcgatgtccctaagcacagcaagctgtgacctgagctagacttctccactggtgatcagtagtgttctctgctcacacagtttagtctgtactattcatgaagccatgatgtgagacatagccacgtgtcctgaccttctatctcagcatctgtgatgggtgagggtgagtgggtaagataggctggagagcaagcgtgcagggcttgtattttgtttagatttatttgggtctcaggctgaggaggccatcttctctgggaca

SEQ ID NO: 94864 - DNA, 600 bp, Chicken  19866894564631_1
gctatttaaggtcaactgtcctggttccatcccttccctcctccttgtgccccccccagcccctcagtgtcaggacagcaagaagctgagaacagaaatgtccttggctctgtgcagcactgctcagcaacagctaaaacatcgctgagttatcagtgctggtttcctcctaaagccaaaacacaaaagcatcacaccagatactgtgaaggaaaaaatcaatcctgtcccagatgaaatgtggatacgcttctcatttcagataagaggaaaagtgtttttactcttcatttaccatcrtgaatcttattgcattttgtgatcaatacatcctatgggctgcaagctgagccaggcatcaggcttggtgtgggaaataactctaacttgagtgttaatagcaaaatgcttgaactaaccgctatggataataaaaacagaagtagccattcagatgtggattccagacagcccttacttctttccttattgctgtacctagaaagtaagagttggttacaacacgtccatgggcacaaagctttcctcaaaggtgaagcctggtataaaagatcttaatgcacacttgatgaacaaaaa

SEQ ID NO: 94865 - DNA, 600 bp, Chicken  19866894564638_1
acctgaatgggagggccatgttggtagctgactatacaacccacagaaagacagcgttcaggaaggacaggtgacaaaagaacagatgtcctgctcaggacacaagctgttatttctgaaggagagcaatacaagggctgccaagacctagattggcacagtaaagccatttaaacatcctaaggaccattacagatctccattctttgctctctaacataagaaaattaacctgcagacaagtcactattaagtgatcctccttcagagatgaagacaaacagaattactgccctacaratgggagggaattcactgtcttgaggagctgaccctccttagcasatcctgagagcagaatggcccaatgtagagcatgaaaagatcgcttcaagcagagagacacctggcaaaagctcaccaagcgggatgtaaaaagcctacaatcaggaccatttcttagctcaccatcaagtcatggcctgctcttagcatggcaagctagtttataacacgttttcttaaaaatccagcaacagaacagataggtgtgtctctgtactgatggatgaatgccattccattacagtacgtaagcag

SEQ ID NO: 94866 - DNA, 600 bp, Chicken  19866894564638_2
gaaagacagcgttcaggaaggacaggtgacaaaagaacagatgtcctgctcaggacacaagctgttatttctgaaggagagcaatacaagggctgccaagacctagattggcacagtaaagccatttaaacatcctaaggaccattacagatctccattctttgctctctaacataagaaaattaacctgcagacaagtcactattaagtgatcctccttcagagatgaagacaaacagaattactgccctacaratgggagggaattcactgtcttgaggagctgaccctccttagcasatcctgagagcagaatggcccaatgtagagcatgaaaagatcgcttcaagcagagagacacctggcaaaagctcaccaagcgggatgtaaaaagcctacaatcaggaccatttcttagctcaccatcaagtcatggcctgctcttagcatggcaagctagtttataacacgttttcttaaaaatccagcaacagaacagataggtgtgtctctgtactgatggatgaatgccattccattacagtacgtaagcagcctttaattaggaggatatgagcaaaattaacactcaggcatcat

SEQ ID NO: 94867 - DNA, 589 bp, Chicken  19866894564656_1
  misc_feature (1)..(82): n is any nucleotide
nnnnnnnnnnnnnnnnnnnnnnnnnnnnnnnnnnnnnnnnnnnnnnnnnnnnnnnnnnnnnnnnnnnnnnnnnnnnnnnnnnccttcgccccgccttgccccgcctcgcctgcccgactctcctcgccccacctcacctcgcctcaccccgcctggccccacctggccttgcctggccctgccctcacccaacctcgccctgtctcggcccgccccgcattgcctcgcctcgcctagccctgcccagccttgcctgccacgccttgccttgccctgcctcgcccctactcgccctgccayaccttgacccaccccgcctcgcctcaccccaccccgccttgccccgccttgccccgcctcgccctaccctgcctagcctcgccctgccttgccccaagtcacctgtcacgcctcgcctcgccccgcctcaccccacctcgccccacctctaccacctcgcaatgcatagccccaccccgccttgccctgcctcgctccgcctcgtctcgccccgccccaccccgcctagcctcacccctcctcgcccagcctcacatgccacgcctcacctcgccccatctcgccccat

SEQ ID NO: 94868 - DNA, 599 bp, Chicken  19866894564658_1
  misc_feature (1)..(3): n is any nucleotide
nnncagcaggggcagctacctcacacccgttccagcagaagttcttccaaccaagtactaaatcacgctcttctggtacagagtattagtatatgatcggaaaactgctgctaactgagcagtggtaacaagctgatcttgtaaaaacaggtttcttctgtgccagtattgatttccagatgaagcaactctgtcaggctctaggtcactgctttctcctctgtggggcagctgatttgcagttctgtgtcacaaaagaagcctcgtgaggccaggccatgtttggaaggaggcagagayacatacaggacctgagggcagaggtcagatcctttctaggccttccaccttgcagaatgacctggtgcttcatagaaggggtttsatccactgtggacacagagcrtctgtccatcctgtgggcggactgtggtttcaagaccacgtttcagatgaaaaagtttgtagcccatatgaacattgaaagaaacctcttcaccaaaagctcactggtgacaaatgtggctcaatgcatagcagttgtgtgacaatcagttcctgatcatacaatatggaaagatcaatcacatgcaggagtg

SEQ ID NO: 94869 - DNA, 600 bp, Chicken  19866894564658_2
ttagtatatgatcggaaaactgctgctaactgagcagtggtaacaagctgatcttgtaaaaacaggtttcttctgtgccagtattgatttccagatgaagcaactctgtcaggctctaggtcactgctttctcctctgtggggcagctgatttgcagttctgtgtcacaaaagaagcctcgtgaggccaggccatgtttggaaggaggcagagayacatacaggacctgagggcagaggtcagatcctttctaggccttccaccttgcagaatgacctggtgcttcatagaaggggtttsatccactgtggacacagagcrtctgtccatcctgtgggcggactgtggtttcaagaccacgtttcagatgaaaaagtttgtagcccatatgaacattgaaagaaacctcttcaccaaaagctcactggtgacaaatgtggctcaatgcatagcagttgtgtgacaatcagttcctgatcatacaatatggaaagatcaatcacatgcaggagtgacagccaagtccatcatcccatttcattctctactcctccagtgtggatgctgagagcctgggacayagcaacagtggtttcagag

SEQ ID NO: 94870 - DNA, 600 bp, Chicken  19866894564658_3
gctgctaactgagcagtggtaacaagctgatcttgtaaaaacaggtttcttctgtgccagtattgatttccagatgaagcaactctgtcaggctctaggtcactgctttctcctctgtggggcagctgatttgcagttctgtgtcacaaaagaagcctcgtgaggccaggccatgtttggaaggaggcagagayacatacaggacctgagggcagaggtcagatcctttctaggccttccaccttgcagaatgacctggtgcttcatagaaggggtttsatccactgtggacacagagcrtctgtccatcctgtgggcggactgtggtttcaagaccacgtttcagatgaaaaagtttgtagcccatatgaacattgaaagaaacctcttcaccaaaagctcactggtgacaaatgtggctcaatgcatagcagttgtgtgacaatcagttcctgatcatacaatatggaaagatcaatcacatgcaggagtgacagccaagtccatcatcccatttcattctctactcctccagtgtggatgctgagagcctgggacayagcaacagtggtttcagagttcactcagacattcagggca

SEQ ID NO: 94871 - DNA, 395 bp, Chicken  19866894564658_4
gcttcatagaaggggtttsatccactgtggacacagagcrtctgtccatcctgtgggcggactgtggtttcaagaccacgtttcagatgaaaaagtttgtagcccatatgaacattgaaagaaacctcttcaccaaaagctcactggtgacaaatgtggctcaatgcatagcagttgtgtgacaatcagttcctgatcatacaatatggaaagatcaatcacatgcaggagtgacagccaagtccatcatcccatttcattctctactcctccagtgtggatgctgagagcctgggacayagcaacagtggtttcagagttcactcagacattcagggcaacacagggtagaagtactgagagcttaacctctaaactgaggaagagtaagtcca

SEQ ID NO: 94872 - DNA, 531 bp, Chicken  19866894564664_1
aatggcttgggctggaagggacctcaaggatcatcaagctccaacccccatgctgcatgcagggctaccaacctcaccatttaataccagaccaggccgcccagggccccatccaacctggccttgaacacctccatggatgaagcatccacaacctctctgggcagctgttccagcacctcaccactctcatagtaaagaacttcctcctgacatccaacctcaatcttccctccttcaacttaaaaccatttccccttgtcctgccattatctaccctttcaaagagttgaaaccacrcgcaagctcttctgtttttacgccagcacaacttttctgtccctcctgatctcaagatctaaaagaaaacacaactctggtactaaagtatctgaattaacgcttacttcagcaacgcctttaaaaaaagaagtttctctgctaaaaggaaagcaaataaatcggggtatcctctgatcttgaataggacatgagcagattttagtgaggccctacacagcttaagcaatg

SEQ ID NO: 94873 - DNA, 599 bp, Chicken  19866894564665_1
  misc_feature (1)..(5): n is any nucleotide
nnnnngcttaaaaaacaaaatggaacagaacaacaacaacaaaaaccaaccatgaaaaacccctgagaaacccagaagacattcctgacaatatgttccctacctaagctcttgtgttgactggaaacacaacattggaaataagagctctacagctgttggcttgatgtctgtgcccagccctgtaggaactgtgggtggccagtgtctctggaaagcatgctctaaatctggtttgtggtgtctgacccattctaaaacattagcagtagaagacttgctgtcagctgccaatatcaytacacygtcccgttgtcattgtggtgtgagctgggtcttttagcaatataaatgtaccatctaaagatgtacgtggaagtattagccttataatacaggctttagcatgtccctagacatctctgtctttgccatttactttctgttatcagatttctctttgacctgaaaactacgtatctgcacttcaacacctttataatgaaaatgctcctctttgtccaaaaagcaacatagatgtatagtgtttctagggcccaaactattaactcatccaaccagtgcagtattaccagcat

SEQ ID NO: 94874 - DNA, 600 bp, Chicken  19866894564665_2
cttaaaaaacaaaatggaacagaacaacaacaacaaaaaccaaccatgaaaaacccctgagaaacccagaagacattcctgacaatatgttccctacctaagctcttgtgttgactggaaacacaacattggaaataagagctctacagctgttggcttgatgtctgtgcccagccctgtaggaactgtgggtggccagtgtctctggaaagcatgctctaaatctggtttgtggtgtctgacccattctaaaacattagcagtagaagacttgctgtcagctgccaatatcaytacacygtcccgttgtcattgtggtgtgagctgggtcttttagcaatataaatgtaccatctaaagatgtacgtggaagtattagccttataatacaggctttagcatgtccctagacatctctgtctttgccatttactttctgttatcagatttctctttgacctgaaaactacgtatctgcacttcaacacctttataatgaaaatgctcctctttgtccaaaaagcaacatagatgtatagtgtttctagggcccaaactattaactcatccaaccagtgcagtattaccagcattacaaac

SEQ ID NO: 94875 - DNA, 599 bp, Chicken  19866894564666_1
  misc_feature (1)..(18): n is any nucleotide
nnnnnnnnnnnnnnnnnntactcacaaatgctctttctttttccatttctctaatgcaagtaacaccttatttaacagctactggtgttgtcacattcattcagtcaagcagaagttgggagttatgttctgctaccatattctgcgatggagagcatccagcattcagaggttacatccccacagctcaatctagtcactgtgacaaatatgatcatttacaggacagtaaacgaccacacatttgtagctatttgctacacctcagtgataaatttaaatgtcccgaacaaagacagyctatgagctatataagtaacctgtaaatcaagatagtaagttgccataataaaatttctattcctttggtgagatgtatcttgagagtaaggaatgcagagaaattcatgagcaaatgtcatctctatgaggaacgatacaaagcaatttaaaaattaagacttcaaggtcaggctagcaataattgatcaagtgctacatttttgtgaattagtatgctaaatgtccttgctgcatgagtctaatgtagctagagctgaaatagttaaagctcaaaatggtacacatccttgtatgtt

SEQ ID NO: 94876 - DNA, 600 bp, Chicken  19866894564669_1
acagggaatggagaccctacaggtaatgccaagaaattctcggataaccttttccttgaagagtgctgttctttgtttttcactgagtaattccattccctgttgctttgtcttgatgttgtacaggtcataggtgtatggctgtacttggcacaccctcagggtagctaacagcgtcctgtggagaacaaagaacagatctagggtgatgctgatagagttccaaatgtaaataacgtgtgggctagcatcctacaaggcatcttaaacgctgaactgtgatcaggcagtagcagtttygaagtagaaaccttccatcccagcagcctgaactgggattcgcatagatgtgttcttggctttgactaatcacatttagagattcctgtgcaaaacagatgaagtccacgcttcattctttgctttaagcccgttattgactcagacttcagaattttgcaatctgtgagagactggaaaacactaaaaattttttaggtgtggaactaaaatcttactgatgcccttgcttgaatccagcctcctccacttgtgccgatgttgcagactccaggttggtcgcagtcaagatagaagttg

SEQ ID NO: 94877 - DNA, 600 bp, Chicken  19866894564684_1
ctgagcacatgatctggctataggtgtccctgtttgttgcaaaggagttgggctatttgatcgcaaaggtactcgtccaactcaaacaattctatgataaagaaagcaggggagaaaaagggaaatgaggagatacatcatgagaattcaactaaggtgtgagatgatgccatctgcctttttctggtagagaagccccaggatgaatgctttccctcaacctacatctagtcagctgcacagcccacccagcttcattaacttcaacagacttttaaacttgcttcaaacggagacacycacatgccaacaatttagctcagggcttgaatcctacaagtgattttgcttgtctccaattcctgaagactgtcaaggcaaggctggatcaggccttgggcaactagatctagctgtgcaagtccctgttcattgcaggggagttggactagatgacctctaaaggtcccttccaactctaaagattctatgattctatgagtctaagtccttgctgatgccatgtgaaatgctgcagtaaagaccctcgctgagttccagaaaggttctgaactttcaaaaggaaacttaaataaatga

SEQ ID NO: 94878 - DNA, 600 bp, Chicken  19866894564686_1
gaggctgaaaatgcatttatagtagatacatggcacacagaacacacgtatataccccatacaatcacatacatacatagctgggcatgcagttcgcaggcacagagcaacaacaagtccttaatttgcattcccaccttccttcatacctctgtggtcctctgggtgtgtggaggtggacccttcatggctctacaatgggtctagagcagcctaccaacctgtcatatcctatacttatctaaacctacatcttaatcttttatttaagccaaaacgaatgagctagcattaaatcaraacaagaagaaagcatatacaaagtgcaagaatagggaagaaaaaggcaagatctaacatcctcatactggttctgattattacaggaagtgggattacaaacctgatatttggtagccgtgaagcagatttgacaagagtcaataccatgggcaacaagcagcatgagaaaggatcttagagcagatgttgtgtaagcctttggatagcaagatcataactatgctactggactcctcatgagatggagcgtccaggcaacagcctgaaggcaacttccttgtgagaaaaagcctgtac

SEQ ID NO: 94879 - DNA, 518 bp, Chicken  19866894564692_1
agacccttaagtcttaatgctatgaattatctaaaactacagacaaagagaatgaaaccatctatgaggataatcaattttcttggtattaatccaatccaaatatatttagaaccacagagaatttcttctcaggatgattctctgagtgtctttcatctcacctcctgttccaagttgcttttgacctttcccatgacattgcacaccacagaggtactgggggacaggagcaatgtgactgcctgtgggtgggggagccaattaattgcttctatttctccctgtgctgcagagatyggaacttcatactatgccgtggctgtggtaaggaagggctccaacatcaccatcaacagcttgaagggcgtccgctcatgtcacacgggcatcaacagaactgcaggctggaacgtgcccgtgggttacctgattgacagcgggcgcctgccagcaatgggatgcgacctcccgaaaggtaagagctgagagggctgagatctcttcctcggcagtgt

SEQ ID NO: 94880 - DNA, 600 bp, Chicken  19866894564702_1
agtctggattaagtaactgaagaaacttccacaaagctaatattatcccagtgtccgctgacttataaaccaacaaccaaaccattgacttttcttctccaaactgtaccataaaacaggaatgggtatcactgagaggttccagagcacaaacactggttactttcataactcagttacataacaggaccaaattggcaaaggctcattccctatcacaattaaggaaattacaggaaggctttccctaagcagcagttgaaaacagacccaatgtaaaacatgaacttaagaaacagwtattaaataactcttgagtgtataaatcatagaatagcttagattgggagaagagcttaaagatcatctagctcactcctgtgctggagaccacaggcctggtcacagtacttcagatgaggcctcacaagggcagaggagagggggacaaccacctccagttccctgctggccacctctctgctgatgcagcccaggatatcattggccttctgggccccatgagcaccctgctggctcacgtcccatctttcacccatcaggacctccaggctctcttcagcagggctgctctcaatg

SEQ ID NO: 94881 - DNA, 599 bp, Chicken  19866894564705_1
  misc_feature (1)..(31): n is any nucleotide
nnnnnnnnnnnnnnnnnnnnnnnnnnnnnnnttggggcacgtggaagcaggtgccctgtgactgtgtgtgaggaggacctcttttgaccgcttcctgttggttggtgcctgtgggtgccctcccagcagccatgcaacaacctcagagtgagtctgttgtgatttaatgagatgtgggtctgaggacgcttgtgcttttttcctgtatgtaacttttggatggctgcaagcacaccaggtaccaggaggtccctcatgttaaagggctagtgaagccaaagagctcctccactttgaggmagccaractggttgcatgagctggggatgccaaagcagatgaggagcccatctgctaatttgctagatattgccatggctgttttaakattagctctttggagccaaatgaagtagtatgcctgatcagtatggccatcagcttaagttgctgtgcaaacaataaagtaatagttttatcttttttttttccccaatcatttttataaaatctgcttttacaagataatattcttccttgtgaaaaatgaatctatttattggtattgtactttcaggtaataccacttacgttcctag

SEQ ID NO: 94882 - DNA, 599 bp, Chicken  19866894564705_2
  misc_feature (1)..(25): n is any nucleotide
nnnnnnnnnnnnnnnnnnnnnnnnnttggggcacgtggaagcaggtgccctgtgactgtgtgtgaggaggacctcttttgaccgcttcctgttggttggtgcctgtgggtgccctcccagcagccatgcaacaacctcagagtgagtctgttgtgatttaatgagatgtgggtctgaggacgcttgtgcttttttcctgtatgtaacttttggatggctgcaagcacaccaggtaccaggaggtccctcatgttaaagggctagtgaagccaaagagctcctccactttgaggmagccaractggttgcatgagctggggatgccaaagcagatgaggagcccatctgctaatttgctagatattgccatggctgttttaakattagctctttggagccaaatgaagtagtatgcctgatcagtatggccatcagcttaagttgctgtgcaaacaataaagtaatagttttatcttttttttttccccaatcatttttataaaatctgcttttacaagataatattcttccttgtgaaaaatgaatctatttattggtattgtactttcaggtaataccacttacgttcctagagagaa

SEQ ID NO: 94883 - DNA, 600 bp, Chicken  19866894564705_3
cgcttcctgttggttggtgcctgtgggtgccctcccagcagccatgcaacaacctcagagtgagtctgttgtgatttaatgagatgtgggtctgaggacgcttgtgcttttttcctgtatgtaacttttggatggctgcaagcacaccaggtaccaggaggtccctcatgttaaagggctagtgaagccaaagagctcctccactttgaggmagccaractggttgcatgagctggggatgccaaagcagatgaggagcccatctgctaatttgctagatattgccatggctgttttaakattagctctttggagccaaatgaagtagtatgcctgatcagtatggccatcagcttaagttgctgtgcaaacaataaagtaatagttttatcttttttttttccccaatcatttttataaaatctgcttttacaagataatattcttccttgtgaaaaatgaatctatttattggtattgtactttcaggtaataccacttacgttcctagagagaaatgaagaaaactatgtgacaccttcaatttttcatttgacttcgttgttctttttttttttattattattatttgacattgat

SEQ ID NO: 94884 - DNA, 536 bp, Chicken  19866894564714_1
tatgctactataaggacaaatggctctaagattgttgttttcctttcagtttggtagacaccactttttttgttcctgtttttaactagccaaagaattttggtaagccaaaattcgtctttggaataacacaaaatgtgctgtgggaaaatatcaaggctgccaagttctctggattttggtgaaaataattttggagggagacatattgaggtttatacttgggcaaataccccactgattcatctgtgttaaagtcatcacaaagagattatggaaaaggactgagaccatatgcgrtatgtttcwgtaatgcattttttgtgtgtccaagatggctggtattagctctatttcaacgttttctggcttattttttaattctttcaccactgtagttcatatgttgtaaaaagacccttcctgatgttaggaaggaggcaatttctagccttgcttcttcataagagatggtaatagcaggttctagagttgctggtgatagaaaaaaatcatggtcagaaagacaacatttt

SEQ ID NO: 94885 - DNA, 527 bp, Chicken  19866894564714_2
ataaggacaaatggctctaagattgttgttttcctttcagtttggtagacaccactttttttgttcctgtttttaactagccaaagaattttggtaagccaaaattcgtctttggaataacacaaaatgtgctgtgggaaaatatcaaggctgccaagttctctggattttggtgaaaataattttggagggagacatattgaggtttatacttgggcaaataccccactgattcatctgtgttaaagtcatcacaaagagattatggaaaaggactgagaccatatgcgrtatgtttcwgtaatgcattttttgtgtgtccaagatggctggtattagctctatttcaacgttttctggcttattttttaattctttcaccactgtagttcatatgttgtaaaaagacccttcctgatgttaggaaggaggcaatttctagccttgcttcttcataagagatggtaatagcaggttctagagttgctggtgatagaaaaaaatcatggtcagaaagacaacatttt

SEQ ID NO: 94886 - DNA, 600 bp, Chicken  19866894564735_1
ccctccccctctcctggctccaggtctttgaactctcttcagctggcagagggcaatggagaccattgccagcaccttcaaaactgccatgcccttttctgatgagcagatggccttcatttacttctcttccagtctaacccatcaatgaactccctgctgaggcaaggatctgccaagcaggcctggaaatggtgactggtttaagaccatcaacacatttcatttggacttccaaaatatctgtatcaagcagagagaggccggcaatcttgtcactgttgagctctaaagataacytggcagaaattaattgactttctcttatatgtgggcactrctacctcggacttgctgaacacaggctttctggccctcctttggccyaaacatgagtccacatacttcctgtatcttctttaataggcttcattagcggtaagaagtggatggcacagcagatggtcttcgttttctttccactcaaagtccaagtctctgcatatacctcagctgtgtacctcatggctttaatcttccaaacactatggtatacttgtttaacacaagcttgcatttcctcggtttaaaacatcagca

SEQ ID NO: 94887 - DNA, 600 bp, Chicken  19866894564735_2
agctggcagagggcaatggagaccattgccagcaccttcaaaactgccatgcccttttctgatgagcagatggccttcatttacttctcttccagtctaacccatcaatgaactccctgctgaggcaaggatctgccaagcaggcctggaaatggtgactggtttaagaccatcaacacatttcatttggacttccaaaatatctgtatcaagcagagagaggccggcaatcttgtcactgttgagctctaaagataacytggcagaaattaattgactttctcttatatgtgggcactrctacctcggacttgctgaacacaggctttctggccctcctttggccyaaacatgagtccacatacttcctgtatcttctttaataggcttcattagcggtaagaagtggatggcacagcagatggtcttcgttttctttccactcaaagtccaagtctctgcatatacctcagctgtgtacctcatggctttaatcttccaaacactatggtatacttgtttaacacaagcttgcatttcctcggtttaaaacatcagcaaggaatcaatgggttccggtgtaactgtgggaagggatta

SEQ ID NO: 94888 - DNA, 600 bp, Chicken  19866894564735_3
catgcccttttctgatgagcagatggccttcatttacttctcttccagtctaacccatcaatgaactccctgctgaggcaaggatctgccaagcaggcctggaaatggtgactggtttaagaccatcaacacatttcatttggacttccaaaatatctgtatcaagcagagagaggccggcaatcttgtcactgttgagctctaaagataacytggcagaaattaattgactttctcttatatgtgggcactrctacctcggacttgctgaacacaggctttctggccctcctttggccyaaacatgagtccacatacttcctgtatcttctttaataggcttcattagcggtaagaagtggatggcacagcagatggtcttcgttttctttccactcaaagtccaagtctctgcatatacctcagctgtgtacctcatggctttaatcttccaaacactatggtatacttgtttaacacaagcttgcatttcctcggtttaaaacatcagcaaggaatcaatgggttccggtgtaactgtgggaagggattaatcaaattaactgcataatgaaacatcagctatctgatgggagttgc

SEQ ID NO: 94889 - DNA, 600 bp, Chicken  19866894564740_1
aaaagccagctcatggggtgggtgtgtgcttgtattcactgggatttttttgtatgtgggaacctattgtacagttgtgtgcactggattcagttcttgccttttggcagacactcagaaatcttaaattcatgaccacaatattaagccatcttggagggagggaggcagcaggatttgcaaggataaaagagccatgttcagcacagtttatttcagacacttgtatcagaagacaaacataatgtaaggttggtaaatgataatcaatgtgggtgcagtttctttcattttctattwgataatatttctgtttatgggagctcaggtgaacactgtctttccagaaatataatctggaggggttttattgtggctttataacagttccaccttaccactaaagctttctctttggtgtttgagttggaatgtcttttgtatgaaggcaatgtaagagagtgcagcagaggagcaagataattgacttgtgtaatcatccgattcgttcctgttcttctttgatctcttttaaatgcagccatacaaataattgatatagtactgctaatactgcatataacagaagttatggaaact

SEQ ID NO: 94890 - DNA, 599 bp, Chicken  19866894564743_1
  misc_feature (1)..(211): n is any nucleotide
nnnnnnnnnnnnnnnnnnnnnnnnnnnnnnnnnnnnnnnnnnnnnnnnnnnnnnnnnnnnnnnnnnnnnnnnnnnnnnnnnnnnnnnnnnnnnnnnnnnnnnnnnnnnnnnnnnnnnnnnnnnnnnnnnnnnnnnnnnnnnnnnnnnnnnnnnnnnnnnnnnnnnnnnnnnnnnnnnnnnnnnnnnnnnnnnnnnnnnnnnnnnnnnnnnnccagcagcagcccacgcactgcaccctccaaagcagccatgacaactcagtgcccagtgctgtgctgctcccagccagagggctcgtgscaccagctcctccatcccaagcatatctgcactgcaaatcaggggctcgtgctagcagacrattcatcctaccaaaataaatacataaaaggaaagagagcagccagcacaatgcagatgtggcgatgtatagccagtcttttcctctgggagcagctgatggttacatcagttgcaaacaccaaactattttagagtctggaggcatcaygcactgaagcagtggtatcactattgggtctcctctttccccccatccagaagctggctctygctcccaaggcaagaaccaagtgcta

SEQ ID NO: 94891 - DNA, 599 bp, Chicken  19866894564743_2
  misc_feature (1)..(150): n is any nucleotide
nnnnnnnnnnnnnnnnnnnnnnnnnnnnnnnnnnnnnnnnnnnnnnnnnnnnnnnnnnnnnnnnnnnnnnnnnnnnnnnnnnnnnnnnnnnnnnnnnnnnnnnnnnnnnnnnnnnnnnnnnnnnnnnnnnnnnnnnnnnnnnnnnnnnnnccagcagcagcccacgcactgcaccctccaaagcagccatgacaactcagtgcccagtgctgtgctgctcccagccagagggctcgtgscaccagctcctccatcccaagcatatctgcactgcaaatcaggggctcgtgctagcagacrattcatcctaccaaaataaatacataaaaggaaagagagcagccagcacaatgcagatgtggcgatgtatagccagtcttttcctctgggagcagctgatggttacatcagttgcaaacaccaaactattttagagtctggaggcatcaygcactgaagcagtggtatcactattgggtctcctctttccccccatccagaagctggctctygctcccaaggcaagaaccaagtgctatgtttaacacctgtctgatgcaggctgcaggtgtggtaggaaccaccttgtccagtgctga

SEQ ID NO: 94892 - DNA, 579 bp, Chicken  19866894564743_3
ccagcagcagcccacgcactgcaccctccaaagcagccatgacaactcagtgcccagtgctgtgctgctcccagccagagggctcgtgscaccagctcctccatcccaagcatatctgcactgcaaatcaggggctcgtgctagcagacrattcatcctaccaaaataaatacataaaaggaaagagagcagccagcacaatgcagatgtggcgatgtatagccagtcttttcctctgggagcagctgatggttacatcagttgcaaacaccaaactattttagagtctggaggcatcaygcactgaagcagtggtatcactattgggtctcctctttccccccatccagaagctggctctygctcccaaggcaagaaccaagtgctatgtttaacacctgtctgatgcaggctgcaggtgtggtaggaaccaccttgtccagtgctgaacagatcaaactctgaagcaaaggagaaagacgagaatacaaggacaagaagaattacagctctgaaagctattattgcccctaaagccccctaaatgtacttcactcatctccccaagtatgaggacaa

SEQ ID NO: 94893 - DNA, 517 bp, Chicken  19866894564743_4
ccagcagcagcccacgcactgcaccctccaaagcagccatgacaactcagtgcccagtgctgtgctgctcccagccagagggctcgtgscaccagctcctccatcccaagcatatctgcactgcaaatcaggggctcgtgctagcagacrattcatcctaccaaaataaatacataaaaggaaagagagcagccagcacaatgcagatgtggcgatgtatagccagtcttttcctctgggagcagctgatggttacatcagttgcaaacaccaaactattttagagtctggaggcatcaygctcccaaggcaagaaccaagtgctatgtttaacacctgtctgatgcaggctgcaggtgtggtaggaaccaccttgtccagtgctgaacagatcaaactctgaagcaaaggagaaagacgagaatacaaggacaagaagaattacagctctgaaagctattattgcccctaaagccccctaaatgtacttcactcatctccccaagtatgaggacaa

SEQ ID NO: 94894 - DNA, 599 bp, Chicken  19866894564751_1
  misc_feature (1)..(113): n is any nucleotide
nnnnnnnnnnnnnnnnnnnnnnnnnnnnnnnnnnnnnnnnnnnnnnnnnnnnnnnnnnnnnnnnnnnnnnnnnnnnnnnnnnnnnnnnnnnnnnnnnnnnnnnnnnnnnnnnntctagtggacagcatctgtttttaacagatggaaatcaatttggatatgtacaagactgtcagtaatgtatagcctaaatgttggtggattcccataagtgctccctacattattcccatattttccattttttaagatacagttttgtaacttggaaacaagtttttgctaagcctaattaacatrctgcttttcatgtaagagctggagggaaggagtgtcgttactcacagtgttgtcatatcccttttttttctaccagtttccaagattcagtgctgcgggaagcccagccaaataaatgttctgttctcagcccgatgtgccaggcacacagcggcaggggggaggctgatgattgtgtggtgctggaccttgcaatttggactgccaaatttgagacagcactaaaggaatctcatccttttgagcctttgcagcttaaagcaaaatcctaaatgcagatcctgttcccagtgatttca

SEQ ID NO: 94895 - DNA, 600 bp, Chicken  19866894564752_1
tgcacatatatatatgaacacacacatgtacatacacactaccaatactcatctcttttggcaatcctaaaataaagaatttaagagaaaactatttactgcaaaaaaaaaaaaaaaaaaaatcatgccttagatctcccttagacttgttcaaacccctaaccaattataatataaccagttgtgatagcacagcgttacacttctttgataaatctctaaaacagagttaccagaatacattattacagggcaaatataatgaaacaaaacttaatgtagcaggccacatggaaaatracaagggcttttatataagatggttttacttgccaaaagcaatctggtgtttaatgaagctaatccatgttttcttatctcattgaggctaagtgagatcctacttaagaattggcatttcaagtgagaacagaagctacagaaagcattgcccactacattggatcttaygaaagaaaacaagaaaatgtctcaaaataaaataaaataaaataaaataaggcctcaaaacctaactaggtttcaggtgatgagtgatacagagatatgtatatagcaaaaactgaaaatgaaagaaag

SEQ ID NO: 94896 - DNA, 600 bp, Chicken  19866894564752_2
atataaccagttgtgatagcacagcgttacacttctttgataaatctctaaaacagagttaccagaatacattattacagggcaaatataatgaaacaaaacttaatgtagcaggccacatggaaaatracaagggcttttatataagatggttttacttgccaaaagcaatctggtgtttaatgaagctaatccatgttttcttatctcattgaggctaagtgagatcctacttaagaattggcatttcaagtgagaacagaagctacagaaagcattgcccactacattggatcttaygaaagaaaacaagaaaatgtctcaaaataaaataaaataaaataaaataaggcctcaaaacctaactaggtttcaggtgatgagtgatacagagatatgtatatagcaaaaactgaaaatgaaagaaagccaggacgaaattcagagaaaattggttactatggtcacagagaaaagcaaagatttttttttaatttaagcttgctgaaaaacaagaagagatttgtgaacaagagtatcacctcttgctgtttgtttctcatttgtaatgtttatttctaaggaagttttaatagacaa

SEQ ID NO: 94897 - DNA, 600 bp, Chicken  19866894564753_1
gtgccatcggtcaataaagctctaaaaactattgtgacaaaaatatgtgttttttaaaacatcaaagctatcaagaaggaaaaatgaaaatgaatggaattgaaagtcaccccactgctgccgaaaatcttattcctattcttctaagagcactacaaagttaaattgcataagggaaagattttcaaagccacagaaggacaaataggtatcccactcccattaaaagttatttctactgtttcaaataaatccagtagaaacaaacatagagtcttaatttacagagaaattggaaasaaattgttttactcatagcattatgaattgcgttgctaaaccaaggaggcgtgcaatttagataaccctatcactcagacagcagaaaattttttatattgaacaagtgaatgatggtaatgagaaagtcatcaaaatgacagtacagagacatttcactgagataaacctacccataaggaaggcatccacaacatcatgatgatgatttttcagcaagttcatgacatgcaactgtttgacactctttatggagaaattcctcagagcagcactgagctcttagcagtactaagtact

SEQ ID NO: 94898 - DNA, 553 bp, Chicken  19866894564754_1
gagtttacatgctttcagttctctgacatgaatactgtggagcagagggacgagcctaagtgtctgcagcaccttacaaaactcaggtagtgagagatggcttctcatctccacattccttttgcgatatggagcaccaagcgaatccttataagatcagcaaaatggttcacttcagcaacgccacaactactagtggttgtacttggcaaggttgttctcttcctctgcttcccattttcagtcttcctgtgctgttaccagggctcagtgaaacaccccaaacccttaacccacttrtgaaaatcttttcagttgcagaatgcgtttcatagagcaggaagccgctccttacagcctacccagtcaatctgaggaggtaggagggtcgtaagccatgtctacttgagacaattattcatctgtctgtatggaatgagagttgtcgaacgagtcatgcactgatgaacataaagagggaaagaatgctggagcacaaataatgctgcgctgcttggcacccagcctggcttttatgggtttctgtgaatta

SEQ ID NO: 94899 - DNA, 600 bp, Chicken  19866894564756_1
gccgttaggattaggaaaatggcatttaaaaatcatgaccttgtgcttcctagtggtgtataatgaccaccgatgaaggaacccagacctttgtgtgctactgcatccttctgatcctcagcgcacaattttgttttcccctctggtgcttgttactctgctatgatgtctctcctgagtctggccagtgctgagagcaagaggaactaagctccctgggtgggaaatgttagcacaaatcccagaatgaaaaatagcgtttggtgttctgttgaacagggcactgcgaggctgaccctrcrcccagtggaaataacaagcttggtaaatgggtttgcatgaggtgcgatcaagacaataatctcattggggaaaatattctcactggtgtcacaagcacacttcatctgtgttgctggctgggaaggctgccttagacaaatctgtctcattatttttgcttgattcagggactgaagtattctgggccagtttaacttctcagtgcatttgccagtgacgttttgtttgtgattcaggggaaaagatttaatacccatttttgtgtaatgttgtaagcgtagtgctcatgctagattt

SEQ ID NO: 94900 - DNA, 600 bp, Chicken  19866894564756_2
cgttaggattaggaaaatggcatttaaaaatcatgaccttgtgcttcctagtggtgtataatgaccaccgatgaaggaacccagacctttgtgtgctactgcatccttctgatcctcagcgcacaattttgttttcccctctggtgcttgttactctgctatgatgtctctcctgagtctggccagtgctgagagcaagaggaactaagctccctgggtgggaaatgttagcacaaatcccagaatgaaaaatagcgtttggtgttctgttgaacagggcactgcgaggctgaccctrcrcccagtggaaataacaagcttggtaaatgggtttgcatgaggtgcgatcaagacaataatctcattggggaaaatattctcactggtgtcacaagcacacttcatctgtgttgctggctgggaaggctgccttagacaaatctgtctcattatttttgcttgattcagggactgaagtattctgggccagtttaacttctcagtgcatttgccagtgacgttttgtttgtgattcaggggaaaagatttaatacccatttttgtgtaatgttgtaagcgtagtgctcatgctagatttaa

SEQ ID NO: 94901 - DNA, 600 bp, Chicken  19866894564761_1
gtttactattctttcttttaagagtatgtaaagtgtaataattggtttctttgatgttccaagaaaatgccttttttttcctgtatttccagaacagcagtcacaatactgaaattgtgctgagtggttaaatcagatcactttcaagttagatttgaagacaagttcaagtctgatcttcaaacacataggaggccaattcatctcttactgctgcaaattatatgtcactagttatatctctgtgctagaaattagaaattgtgctagaaattactctggctgttcctagttaaaatytgtatagataggtattcttctgtactcaggtaacaggtgtgatagtgactgaaatgttaaatttggtctcatttgttctgtcagagccatgagccagaaggaagaagaactgaaatcagtagaattgtggcaagcatcataacatctttcagtattgggattcttttgttgttgttgttattccataggtgtatttttttatattaaaagtatgatgcaattctttgactattctgtgtcaggctgagtcaatgtcacttgtagcttggactaacgctttgcacacttaaaagcaattca

SEQ ID NO: 94902 - DNA, 600 bp, Chicken  19866894564779_1
gctcctgcttgtgccacatgaatacagtgccatgtatattacagcaattccttcaggaatgacaacaaatactataatattaaggctgtggtaatgggcaattacttgctgcttgcagggatggatactttaaggagagcaccatgactatttgctattggagctgatgaacatagctggatactgtgaaaaatttaaatcccagtactgctaggactacgttagagagcttgtattgaaatgactgacttcttgaatgtataggtgtttctataagtatctcagatttgtcatgcatargatgagcttacaaaccctctagcctgaagttgtgtgagttttctttttgcttgacatgaaaagagatgaccttcagacagtccaagtgttgatgtcaattattagttagcatttggctctatttaaagataccaactagagaaagtyggatacccagtgactgacaatgaggaccgtgtacattaattattgggtttcagtctttgtaaggattaataagaaaatcaacraagtggacagaatcaactgtctttgtggatattctagcatattggagtaagtccttgcattgaaaagtag

SEQ ID NO: 94903 - DNA, 600 bp, Chicken  19866894564779_2
ctatttgctattggagctgatgaacatagctggatactgtgaaaaatttaaatcccagtactgctaggactacgttagagagcttgtattgaaatgactgacttcttgaatgtataggtgtttctataagtatctcagatttgtcatgcatargatgagcttacaaaccctctagcctgaagttgtgtgagttttctttttgcttgacatgaaaagagatgaccttcagacagtccaagtgttgatgtcaattattagttagcatttggctctatttaaagataccaactagagaaagtyggatacccagtgactgacaatgaggaccgtgtacattaattattgggtttcagtctttgtaaggattaataagaaaatcaacraagtggacagaatcaactgtctttgtggatattctagcatattggagtaagtccttgcattgaaaagtagaaggagaattagctgagaaggaatgaaatgaaagatgatgtgcattgttgtttttctgccgaaaccttaagatattttaaatgtaaggagctggaacgctgttaagctcttccacatttgtgctgtatgttgtgtatcaaatgccac

SEQ ID NO: 94904 - DNA, 600 bp, Chicken  19866894564779_3
ttgtattgaaatgactgacttcttgaatgtataggtgtttctataagtatctcagatttgtcatgcatargatgagcttacaaaccctctagcctgaagttgtgtgagttttctttttgcttgacatgaaaagagatgaccttcagacagtccaagtgttgatgtcaattattagttagcatttggctctatttaaagataccaactagagaaagtyggatacccagtgactgacaatgaggaccgtgtacattaattattgggtttcagtctttgtaaggattaataagaaaatcaacraagtggacagaatcaactgtctttgtggatattctagcatattggagtaagtccttgcattgaaaagtagaaggagaattagctgagaaggaatgaaatgaaagatgatgtgcattgttgtttttctgccgaaaccttaagatattttaaatgtaaggagctggaacgctgttaagctcttccacatttgtgctgtatgttgtgtatcaaatgccacatagtagggagaggctcagagttgaaactatttcacattttgtatggctctgattgcatgaatctaggcagttgggtaaaaac

SEQ ID NO: 94905 - DNA, 599 bp, Chicken  19866894564782_1
  misc_feature (1)..(107): n is any nucleotide
nnnnnnnnnnnnnnnnnnnnnnnnnnnnnnnnnnnnnnnnnnnnnnnnnnnnnnnnnnnnnnnnnnnnnnnnnnnnnnnnnnnnnnnnnnnnnnnnnnnnnnnnnnnactgaatattatcaaaattgtgaactggtgatagcagtcaaattccactgagtttaacagagctgagctatttacagcacttccaaatgttactctgttctcaacaccagtatttttctcactttaagaaaagctgttgtttttaagggcaaagctgatttatgacaagccctggtcagccagcagcatgtarctgtactgccccaagagcacagtggtctaaatcttgagactcggagaatcagattttagtccttggtgatcaacatgctatgggagaatacaaccaattcagcacgtcaatcacagagactcttcttacactgctccatcagctgccctatgctcacacagtgtggtgagcagagagrcatgcatagatgaggccttgtcatcaagagtctaatccccctctgctgtacttctttgcacagcaagacttaaacgtgcctgaaatttgcattcagcatattaatatcctacagcatttgt

SEQ ID NO: 94906 - DNA, 600 bp, Chicken  19866894564782_2
ttacagcacttccaaatgttactctgttctcaacaccagtatttttctcactttaagaaaagctgttgtttttaagggcaaagctgatttatgacaagccctggtcagccagcagcatgtarctgtactgccccaagagcacagtggtctaaatcttgagactcggagaatcagattttagtccttggtgatcaacatgctatgggagaatacaaccaattcagcacgtcaatcacagagactcttcttacactgctccatcagctgccctatgctcacacagtgtggtgagcagagagrcatgcatagatgaggccttgtcatcaagagtctaatccccctctgctgtacttctttgcacagcaagacttaaacgtgcctgaaatttgcattcagcatattaatatcctacagcatttgtggaaaacaacagataacaagtatgttttgtaggtctgtatcctcttaggggtaattgatctctgacagttttgcttggcaaaagaataagaatttcaaaatttcttgtctcatgatttctgcctgaagtaagagaatatccaatgaattatagaagtatgaaaactgaaatacaaacca

SEQ ID NO: 94907 - DNA, 600 bp, Chicken  19866894564785_1
ctaaggtaacaaaccaaagctagatcctcttttctcccctctactgaactgataacacacacaaaaaaaacagtaatccaggtgtatacatgcagctttttggtggctgtttatctaatgttgttctacaacactcttaaactgattgtggccaaagaacaatcttcagaggggaagctgcaatatgaggggatgggaactaatctgtccttgattaaacatcaaacgttttaacagtagtccttcacttttagcttgacagagactattgaaaatctgcagacacacgtagatgacctrcaaaggcaagtagaagaactgaaaaagtctggacgaggccggatgaaccatgagagatctgaccagccaagatcaatgcatagcttctcgtgtttgaaggagctgtatgaccttcgccagtaagactcttaccttgcatagcaaacagaatattgaaatactagcatgggtgtttaacagggtaacagaagagcattttcagtttgcaactagaaaaatatctgcacagttgtgcagtgtgtggtgctgtcattgcttctggtgtgctctggctgcagactgtattgatcttagtgagag

SEQ ID NO: 94908 - DNA, 600 bp, Chicken  19866894564795_1
ggattttcagattttcctttcttactttttatttgagggaacccgagttttaaaagacaaggggggaatacagcactatttttttttatcctttgccttcccctctgtttttccttctgcctagcttccatgcagctgttgaacatttaagaaaaacatgtctcccactgagcaagttccctacaaaagtgaattgagcttcaggcaagaggaaatgtgagtcctgaggtcactcctgaaagaaagcccttgcccggctgcacataactttgttgttgtgtgttttaggaacgatttagraaaaaaaaaactattgcacatttcccacaaacggaataaagagaaatgttggtgatcatgagatgatcataagatctttcagttcttattatgtctttctggtattttcagttgtrttttcagagctcactgcttagatccaaacaaaggtggggaagtgggattaggagaagatgatgacttgctggtgcaaatcagagttaatagagaggactccatgtcctccacacagcttgtatgagaagacagaaccctttttccacatttaagatacaccctgtgttcacaggggagtaatat

SEQ ID NO: 94909 - DNA, 600 bp, Chicken  19866894564795_2
ctgcctagcttccatgcagctgttgaacatttaagaaaaacatgtctcccactgagcaagttccctacaaaagtgaattgagcttcaggcaagaggaaatgtgagtcctgaggtcactcctgaaagaaagcccttgcccggctgcacataactttgttgttgtgtgttttaggaacgatttagaaaaaaaaaaactattgcacatttcccacaaacggaataaagagaaatgttggtgatcatgagatgatcataagatctttcagttcttattatgtctttctggtattttcagttgtrttttcagagctcactgcttagatccaaacaaaggtggggaagtgggattaggagaagatgatgacttgctggtgcaaatcagagttaatagagaggactccatgtcctccacacagcttgtatgagaagacagaaccctttttccacatttaagatacaccctgtgttcacaggggagtaatatttctgtcagatatgaaagtagtttctaatctgctctgaccttggtgagaaattcaagtccaaatgtagtaacatagaagctgacaggtcagcctgaagaatttgacgtgggaaagg

SEQ ID NO: 94910 - DNA, 600 bp, Chicken  19866894564795_3
ttaggagaagatgatgacttgctggtgcaaatcagagttaatagagaggactccatgtcctccacacagcttgtatgagaagacagaaccctttttccacatttaagatacaccctgtgttcacaggggagtaatatttctgtcagatatgaaagtagtttctaatctgctctgaccttggtgagaaattcaagtccaaatgtagtaacatagaagctgacaggtcagcctgaagaatttgacgtgggaaaggctttcttgctgtctttctttcttcttttctttcactgaaaatcttamcaaggatcacttccagttctgyggcagtatgaccarccatagaaatgccaccagccgtgtcattgctcctgcggttacaatgaaggcaaccagactcgttgaggatctgctattattgctataaacatttaaagatggagtcctttagagagaaacgtgttaccttttgatgtgctaatactgcaaaagttgatctacattttacagttatacctgacactctacataaagatttctttaccctaacatctttgtactttttttgttttctaagctgtaggcaaatacaatgacccacac

SEQ ID NO: 94911 - DNA, 600 bp, Chicken  19866894564795_4
tggtgcaaatcagagttaatagagaggactccatgtcctccacacagcttgtatgagaagacagaaccctttttccacatttaagatacaccctgtgttcacaggggagtaatatttctgtcagatatgaaagtagtttctaatctgctctgaccttggtgagaaattcaagtccaaatgtagtaacatagaagctgacaggtcagcctgaagaatttgacgtgggaaaggctttcttgctgtctttctttcttcttttctttcactgaaaatcttamcaaggatcacttccagttctgyggcagtatgaccarccatagaaatgccaccagccgtgtcattgctcctgcggttacaatgaaggcaaccagactcgttgaggatctgctattattgctataaacatttaaagatggagtcctttagagagaaacgtgttaccttttgatgtgctaatactgcaaaagttgatctacattttacagttatacctgacactctacataaagatttctttaccctaacatctttgtactttttttgttttctaagctgtaggcaaatacaatgacccacacaaaggctgtagacagttctctc

SEQ ID NO: 94912 - DNA, 600 bp, Chicken  19866894564795_5
gttaatagagaggactccatgtcctccacacagcttgtatgagaagacagaaccctttttccacatttaagatacaccctgtgttcacaggggagtaatatttctgtcagatatgaaagtagtttctaatctgctctgaccttggtgagaaattcaagtccaaatgtagtaacatagaagctgacaggtcagcctgaagaatttgacgtgggaaaggctttcttgctgtctttctttcttcttttctttcactgaaaatcttamcaaggatcacttccagttctgyggcagtatgaccarccatagaaatgccaccagccgtgtcattgctcctgcggttacaatgaaggcaaccagactcgttgaggatctgctattattgctataaacatttaaagatggagtcctttagagagaaacgtgttaccttttgatgtgctaatactgcaaaagttgatctacattttacagttatacctgacactctacataaagatttctttaccctaacatctttgtactttttttgttttctaagctgtaggcaaatacaatgacccacacaaaggctgtagacagttctctcaagttctaaagctt

SEQ ID NO: 94913 - DNA, 600 bp, Chicken  19866894564796_1
atatttagccttggactcattaactacagacagtggatatagccctcttttgagacaaaaaataaggatttgacaaagcttttcctggcatatagaaattaatgtactaaactggactgaaataataaataaattcttcacagaccagtgggtaagataatgcgatacctattttcatccatagctgtcctgaattacattcatataagtatgatgtaggtaaaaagcacctctaattatcattcttttaaaaaggaaagtctcattcagagttccctggttttatgcctcctgattttyacagtctttaagtaagtcctaaaggcacttctgaaataaatgtggcgcatgctgtccttaaaatttaggaatacacaaccagtggcattcacataatttagctttaagactgaaatttatctttcctaaattgctctctggaacagactgtgtagttccattgaccttgctgggaatttaggatcttagactgcaaactaaactgaacctaaattaggtgcctaaagtacatggtgtgaatctctcttatgcgagaggatgtagagaggtaggaagtagtttagtaccagaaatacaatc

SEQ ID NO: 94914 - DNA, 600 bp, Chicken  19866894564805_1
cagaaacttttctaatggcatttctgaaaaagaacctcaaaaaatcacttagcataagtacttgtcaccgtcttacacttacttctgggtctgcagtgaagacaactcaagataggtcagttgcagagaattggcacatggtgagctttgttggaagcattttcactgttctccctccaggctggggcagtgctggcccctcactccttgcccagatctaaaggctggcacaaaaagttggggcacttcttgcttcccaccactacttttgctaccaaagcaagataagtggtgcccacmtgctgcaccacagagtttgtggctttctgagtgctgcagactctccttgagtggccagcaaataacattttgcagcttgtaggcaagcactttgctttaatgttgcagtttcccctgagctttagaatcatagaatcactaagtttggaaagaccactatgatcatctactccaaatatcaagtccaaccattgagtccagatcttccaattacatataaagtaaccccaccaggtgcctctccagccacaccagcagctcagcagaatgttccagcacaaggagccatccacacccttg

SEQ ID NO: 94915 - DNA, 600 bp, Chicken  19866894564809_1
ccaaggagagtacaaagtagacatatgccagaaggatgcccaacacaaggaatggggactgcatcaatggataatcagcaatgcgggggtctgtggagaaagccaaggtgcacagcagtaagcatcccaactccaatctgctaacagcagtgctaacaccagaataaggttaaggacatgaaaatcccattctccaaggacaggaatacaggcaaagggcagcctgctaacagagattggagaacccagcaaagctgtttaagatacagcctgaacctgtgcttcacagctgcctggagragggcacaaatgcctcacaaacactgaggcaagacagtcttaagtagcccaaaaaccccagagctgcacttatgttagggcagaacacagctagatctgcattatatcagatatggcagaacacacccccaggcctgtgccagtacagcagataatgccacccaccccacatctgcatagagccactgacctgcttttttcatgaagtcctgatacatagtcacaatcccctccatggtagtggcagtatgtctgtggagagaggaagggcaggtcaagcagtggttgacccaggaaagc

SEQ ID NO: 94916 - DNA, 599 bp, Chicken  19866894564812_1
  misc_feature (1)..(130): n is any nucleotide
nnnnnnnnnnnnnnnnnnnnnnnnnnnnnnnnnnnnnnnnnnnnnnnnnnnnnnnnnnnnnnnnnnnnnnnnnnnnnnnnnnnnnnnnnnnnnnnnnnnnnnnnnnnnnnnnnnnnnnnnnnnnnnnnnncatcataataatcaccaccacccaccaacaccaacacactccttcccctcttctcctccttcatcataaaatttagcttttcagctctcctgtagcacccataggataaggtattttgcatttatacacacctggctggaaggactgtcaggtcaaccccactgagcacmatctcacagatgtgagtgactctgacttctgcccctccaaaccccacacctgcattaaacatttgcagcctcaattgggtgtaactacagcgtgacaaattgtcataatggcatcagaaaatcagcaccttcttacattagagaggctcagtagtactttcactgccatttggcaaaattgtaagcattctaattaatcccttgataaggaaacaatttaaataatttgaagtggcttattgtgatttttttttccaggtgtcactgcactgggagagagcgcaggaacacacaggtca

SEQ ID NO: 94917 - DNA, 600 bp, Chicken  19866894564821_1
gcacggttctttgagtgtaaaaaagaatgtaggcttgggttttgcacacctcctccacgctgcatacattcagtttggagtcattgcagtggacccaaaagcctaggaatcaaagtgagaaagaagacattagcaggggaggcatcagagacctgtagcatcttttgagtcagaagggaccattaaagatcacctagtccaactcccctgcaatgaacaggaacatctgctgctcagtaaggatgctcagagcctggtccagcctaacttcagatgcctccacagatggggcatacaccwctcctctgracaacctgttccaatgcctcactgctcttactgtaaaaaacttcttccttacgcccagtataaatctcccctctttcagtttgaaagcatttccccttctatcacacagaccctgctatagagtctgtccccytccttcttattagcccctcctttagatactgacggctgctctcagctctccccacagccttcccttctccatcygcacagccccagctctcagcctgtcctcgcagggcggtgtcccatccctgggatcacttctgtggccctctggatgtgctccaa

SEQ ID NO: 94918 - DNA, 600 bp, Chicken  19866894564821_2
tttgagtgtaaaaaagaatgtaggcttgggttttgcacacctcctccacgctgcatacattcagtttggagtcattgcagtggacccaaaagcctaggaatcaaagtgagaaagaagacattagcaggggaggcatcagagacctgtagcatcttttgagtcagaagggaccattaaagatcacctagtccaactcccctgcaatgaacaggaacatctgctgctcagtaaggatgctcagagcctggtccagcctaacttcagatgcctccacagatggggcatacaccwctcctctgracaacctgttccaatgcctcactgctcttactgtaaaaaacttcttccttacgcccagtataaatctcccctctttcagtttgaaagcatttccccttctatcacacagaccctgctatagagtctgtccccytccttcttattagcccctcctttagatactgacggctgctctcagctctccccacagccttcccttctccatcygcacagccccagctctcagcctgtcctcgcagggcggtgtcccatccctgggatcacttctgtggccctctggatgtgctccaacagctccac

SEQ ID NO: 94919 - DNA, 600 bp, Chicken  19866894564821_3
catcagagacctgtagcatcttttgagtcagaagggaccattaaagatcacctagtccaactcccctgcaatgaacaggaacatctgctgctcagtaaggatgctcagagcctggtccagcctaacttcagatgcctccacagatggggcatacaccwctcctctgracaacctgttccaatgcctcactgctcttactgtaaaaaacttcttccttacgcccagtataaatctcccctctttcagtttgaaagcatttccccttctatcacacagaccctgctatagagtctgtccccytccttcttattagcccctcctttagatactgacggctgctctcagctctccccacagccttcccttctccatcygcacagccccagctctcagcctgtcctcgcagggcggtgtcccatccctgggatcacttctgtggccctctggatgtgctccaacagctccacgtcmctcctgtgctgaggactccccatctggatgcagtgctccaggtgaggtctcagtgcagagcagaggggcagatccctycctggccctgctggcagtgctgctttggatgcacccaggatacagttggct

SEQ ID NO: 94920 - DNA, 600 bp, Chicken  19866894564821_4
acaggaacatctgctgctcagtaaggatgctcagagcctggtccagcctaacttcagatgcctccacagatggggcatacaccwctcctctgracaacctgttccaatgcctcactgctcttactgtaaaaaacttcttccttacgcccagtataaatctcccctctttcagtttgaaagcatttccccttctatcacacagaccctgctatagagtctgtccccytccttcttattagcccctcctttagatactgacggctgctctcagctctccccacagccttcccttctccatcygcacagccccagctctcagcctgtcctcgcagggcggtgtcccatccctgggatcacttctgtggccctctggatgtgctccaacagctccacgtcmctcctgtgctgaggactccccatctggatgcagtgctccaggtgaggtctcagtgcagagcagaggggcagatccctycctggccctgctggcagtgctgctttggatgcacccaggatacagttggctttctgggctgtgagagcacagtgctggctcatgctcagctgccacccaccagcacccccaggtcctttttggag

SEQ ID NO: 94921 - DNA, 600 bp, Chicken  19866894564821_5
cctgttccaatgcctcactgctcttactgtaaaaaacttcttccttacgcccagtataaatctcccctctttcagtttgaaagcatttccccttctatcacacagaccctgctatagagtctgtccccytccttcttattagcccctcctttagatactgacggctgctctcagctctccccacagccttcccttctccatcygcacagccccagctctcagcctgtcctcgcagggcggtgtcccatccctgggatcacttctgtggccctctggatgtgctccaacagctccacgtcmctcctgtgctgaggactccccatctggatgcagtgctccaggtgaggtctcagtgcagagcagaggggcagatccctycctggccctgctggcagtgctgctttggatgcacccaggatacagttggctttctgggctgtgagagcacagtgctggctcatgctcagctgccacccaccagcacccccaggtcctttttggagggctgtgctccatccttacacccccagcttgtactgacagtgtgggttgcagtgacccaggtgcagaccttgctcttagctttgttgaacctcatga

SEQ ID NO: 94922 - DNA, 600 bp, Chicken  19866894564821_6
gaaagcatttccccttctatcacacagaccctgctatagagtctgtccccytccttcttattagcccctcctttagatactgacggctgctctcagctctccccacagccttcccttctccatcygcacagccccagctctcagcctgtcctcgcagggcggtgtcccatccctgggatcacttctgtggccctctggatgtgctccaacagctccacgtcmctcctgtgctgaggactccccatctggatgcagtgctccaggtgaggtctcagtgcagagcagaggggcagatccctycctggccctgctggcagtgctgctttggatgcacccaggatacagttggctttctgggctgtgagagcacagtgctggctcatgctcagctgccacccaccagcacccccaggtcctttttggagggctgtgctccatccttacacccccagcttgtactgacagtgtgggttgcagtgacccaggtgcagaccttgctcttagctttgttgaacctcatgaggttcctctgggcccactgctcagcctgtctgggtctctctggtgacatcccatccctcggatgtgttaacctcacca

SEQ ID NO: 94923 - DNA, 600 bp, Chicken  19866894564824_1
gcatttgctcttgttacactctgctatgctgtaaacattccatccgtgtgaataatataaaaactatgcaaatgcattttgcccttcttagtgtatctttctagtatacattttagttttctatagctgtcatgggcatattgcaacatgactctggaaacatgcttgtgtataattccaataagctgacaagaagatcctgttttctaatttacactcacagcttcagtttcaaaaactttttagcctgaagcccaagagctacatagatttctattccacagcaatgtgcaggatcayttctataacttttgtatcagttggagaagaaaatattttaatactcatgcatcccttccttctaatcactacagaaaagaccacactcacttaaaatcagtccattctcacacatttaaagagctgttgctgacattatacataatctgacagatatttttgtttggaaacaattctgcttgcatattacatcatttctgtattgctctagaaatgtcctgtaggggctaggagacaatcagaaatcttgagctctgcgctcactctgccattaactgactatgttcttttagacaagtt

SEQ ID NO: 94924 - DNA, 599 bp, Chicken  19866894564831_1
  misc_feature (1)..(47): n is any nucleotide
nnnnnnnnnnnnnnnnnnnnnnnnnnnnnnnnnnnnnnnnnnnnnnntggctgtgttcagtgggtctaaaaagaaatggtgaaactggaaaagtacttagatttttatcaccgtcacatgaattccagcagcttattgctgcaatcagatttcactgatttttaattgctgttcttcacttgatcacttttaaccagaaataagcaagtaccaacctgtcgttgagagttgcactttcctttttataacagaaacacaaatgttactttgagagaaaggagaaagaaaaagctctgtgcmattttagagccatttatatttaaattaactttttaaatgttggccatattcatatcttttatattcaacccaactgcaggaagaaagcaacaagtgagggaaaaatgtataagaacaactttaatctaaaatccaatgcaacaaaaatgtatawtaatgattaataaagtacgtccccagaatgttattaaaattcctacttaaaggaaccagttcttaaatgaaatgtagtatctagtgcactgaagtacagatgaggaatgaataaataaggaactgtgagattgttaccatgtatt

SEQ ID NO: 94925 - DNA, 600 bp, Chicken  19866894564831_2
ctgatttttaattgctgttcttcacttgatcacttttaaccagaaataagcaagtaccaacctgtcgttgagagttgcactttcctttttataacagaaacacaaatgttactttgagagaaaggagaaagaaaaagctctgtgcmattttagagccatttatatttaaattaactttttaaatgttggccatattcatatcttttatattcaacccaactgcaggaagaaagcaacaagtgagggaaaaatgtataagaacaactttaatctaaaatccaatgcaacaaaaatgtatawtaatgattaataaagtacgtccccagaatgttattaaaattcctacttaaaggaaccagttcttaaatgaaatgtagtatctagtgcactgaagtacagatgaggaatgaataaataaggaactgtgagattgttaccatgtatttattggtcttgatttctagaaatgaagaccagtttaccactgagtacgcttctggccgtcacttgtttcttctgacattaggcccattcagatacttattgtcactatttaagcatggtagagcctattcatctttttaacagaattggagcttt

SEQ ID NO: 94926 - DNA, 600 bp, Chicken  19866894564839_1
cacatagacagacattgagttctggttttctgaatgccacagagagagttgtggacctcaaagctgcacccatattacgtgtctgcaattcttctattgaataatttggtaactgacctcaaagatgaaactgctttcttccttgtggtaagaatcatgaaagattagaatgggaacaacagaagatccacccaggaaagtctagtagttggctgctatgaggacctccaggatttggaagaaaagagaaaagaattggtggtagaaaggagaagtaacatagcaaagagaatttatttmtttacagtacatattaaccgattctagctgaaattagttgagttttacattttggactattcattcaattttggtgctaaaaatttctaaggatggttagaatccagatgtgaatttttttctgaaatttatctgatgattcatcaggaaatatcttttatccctttcaaacattaagaattgttgagcatagacacaactcaaaaagcactgaatcttccgtcaactataatgaacagtgcttccaagttttccaagctcagcatctgaagaaagagcaactggcagaaaaagcacctg

SEQ ID NO: 94927 - DNA, 599 bp, Chicken  19866894564843_1
  misc_feature (1)..(63): n is any nucleotide
nnnnnnnnnnnnnnnnnnnnnnnnnnnnnnnnnnnnnnnnnnnnnnnnnnnnnnnnnnnnnnnttgactgtcagagaccacaagcaggcagccttctatttgccttatatattcagtcatgggcaagagtaactcgatagttatttctgacttgtaggctcaggatgcatcaggatgcatgggttaactgaattatttcattttcagaactctgaagtgtgaaatagattccaaccataactggtcatggatttttcattatctcaactgcttttgctaaacaaggactatatgcattayatatagtcagcactcagttactatcactcagctgcatctgtctctagtttggcgattgcaggactggtcrtggagatgcatatgacactggtgagaacctccatatatattgtagtgtctccatratgtttattcatctctctcacagatcatcctataactattttcttcttgagctagtaatgtgaatggaggaagagtcactctccagtgttcaatgcgagtgggattttgttttcgacttctagcccagtgaatgttacagctgaagagtgcccttactgattgcagaaccacag

SEQ ID NO: 94928 - DNA, 600 bp, Chicken  19866894564843_2
tcagagaccacaagcaggcagccttctatttgccttatatattcagtcatgggcaagagtaactcgatagttatttctgacttgtaggctcaggatgcatcaggatgcatgggttaactgaattatttcattttcagaactctgaagtgtgaaatagattccaaccataactggtcatggatttttcattatctcaactgcttttgctaaacaaggactatatgcattayatatagtcagcactcagttactatcactcagctgcatctgtctctagtttggcgattgcaggactggtcrtggagatgcatatgacactggtgagaacctccatatatattgtagtgtctccatratgtttattcatctctctcacagatcatcctataactattttcttcttgagctagtaatgtgaatggaggaagagtcactctccagtgttcaatgcgagtgggattttgttttcgacttctagcccagtgaatgttacagctgaagagtgcccttactgattgcagaaccacagaatggccaagactgacagggacatccaggtcsatctcatcccatccctgttcaagcagggacacccagagc

SEQ ID NO: 94929 - DNA, 600 bp, Chicken  19866894564843_3
agagtaactcgatagttatttctgacttgtaggctcaggatgcatcaggatgcatgggttaactgaattatttcattttcagaactctgaagtgtgaaatagattccaaccataactggtcatggatttttcattatctcaactgcttttgctaaacaaggactatatgcattayatatagtcagcactcagttactatcactcagctgcatctgtctctagtttggcgattgcaggactggtcrtggagatgcatatgacactggtgagaacctccatatatattgtagtgtctccatratgtttattcatctctctcacagatcatcctataactattttcttcttgagctagtaatgtgaatggaggaagagtcactctccagtgttcaatgcgagtgggattttgttttcgacttctagcccagtgaatgttacagctgaagagtgcccttactgattgcagaaccacagaatggccaagactgacagggacatccaggtcsatctcatcccatccctgttcaagcagggacacccagagcaggtgtccaggaccatgtccaggtggctttggaagaccttcagggaagagaatcc

SEQ ID NO: 94930 - DNA, 600 bp, Chicken  19866894564843_4
ctgcatctgtctctagtttggcgattgcaggactggtcrtggagatgcatatgacactggtgagaacctccatatatattgtagtgtctccatratgtttattcatctctctcacagatcatcctataactattttcttcttgagctagtaatgtgaatggaggaagagtcactctccagtgttcaatgcgagtgggattttgttttcgacttctagcccagtgaatgttacagctgaagagtgcccttactgattgcagaaccacagaatggccaagactgacagggacatccaggtcsatctcatcccatccctgttcaagcagggacacccagagcaggtgtccaggaccatgtccaggtggctttggaagaccttcagggaagagaatccacagcctctgggcagcctgtgccagtgcaccttcaaaattaaaacatgtttcctgatgttcagagggaagctcctgcatctctgtgccatttgtcctgacaccaggcactagtgggaagagcctggctacattccttttacaggttcccttcaggcatttgatgatccatgctgggtaacatggatctttatatctgggtacaata

SEQ ID NO: 94931 - DNA, 600 bp, Chicken  19866894564845_1
gaacattcaagccctaataataaggttaaaggtacatcaggttatgatttctagtgttctattcttaatggtgaatgaatccttgttcttcattattcagaagctattcaagcatctgtctgatagctgatacatggactacaaagatgaaaggtaatgaaatcgaccaagctggcttacttaaagtaagtaagtgacctagaactatgtgactaaaccacatcaatagtctcctactttcttgcattcttttaacaaagtaaaatgaccaagagacttcctgtggtgtttcttaacagytgagagctgtatgagatttttaaaaatctaattggttcaaatcttccctatgttaaactgttctttttaaaactggtgctctgaattagttttttgaggttaagagcttgtaattaaatgaatttcacacatattaccccaattytctctctcttacagtactgcaaaaaaaggagtgaactgaaaacaaaatagcaccaattctttcaactttatgcttacacaggtgattatgactctacaaaagccctgtgaagataaggtaagacctaattgagaatgaaacccatacatctgtaa

SEQ ID NO: 94932 - DNA, 464 bp, Chicken  19866894564845_2
gatgaaaggtaatgaaatcgaccaagctggcttacttaaagtaagtaagtgacctagaactatgtgactaaaccacatcaatagtctcctactttcttgcattcttttaacaaagtaaaatgaccaagagacttcctgtggtgtttcttaacagytgagagctgtatgagatttttaaaaatctaattggttcaaatcttccctatgttaaactgttctttttaaaactggtgctctgaattagttttttgaggttaagagcttgtaattaaatgaatttcacacatattaccccaattytctctctcttacagtactgcaaaaaaaggagtgaactgaaaacaaaatagcaccaattctttcaactttatgcttacacaggtgattatgactctacaaaagccctgtgaagataaggtaagacctaattgagaatgaaacccatacatctgtaaaggggtgat

SEQ ID NO: 94933 - DNA, 599 bp, Chicken  19866894564855_1
  misc_feature (1)..(219): n is any nucleotide
nnnnnnnnnnnnnnnnnnnnnnnnnnnnnnnnnnnnnnnnnnnnnnnnnnnnnnnnnnnnnnnnnnnnnnnnnnnnnnnnnnnnnnnnnnnnnnnnnnnnnnnnnnnnnnnnnnnnnnnnnnnnnnnnnnnnnnnnnnnnnnnnnnnnnnnnnnnnnnnnnnnnnnnnnnnnnnnnnnnnnnnnnnnnnnnnnnnnnnnnnnnnnnnnnnnnnnnnnnncaactcatacactgagtagctttcatagttttctataaggaaaggctaagttactgcatgattgctgtggaaaaaaaaaamaaacatgcaaatcaagatttcagcaccaactgaaatagattttttttcaagttattttgccctaggtgcataattttcttcaagaatttatgtttagctgctgtctgccttcacttcccctcagatttttggaaatcatgctacagggagagaaaagaacacacaaatactttttggaaatgttagtacttttgcacttgggcaacatcatgatctactttctccttttctctactataaacctgagaactcagttatggtcagcacagtcatgtcatgctttggtttctctccaactg

SEQ ID NO: 94934 - DNA, 600 bp, Chicken  19866894564855_2
taattttcttcaagaatttatgtttagctgctgtctgccttcacttcccctcagatttttggaaatcatgctacagggagagaaaagaacacacaaatactttttggaaatgttagtacttttgcacttgggcaacatcatgatctactttctccttttctctactataaacctgagaactcagttatggtcagcacagtcatgtcatgctttggtttctctccaactgtctgtgttgaaagctagttttcatacctatcacaatgctgaatccaccttatcccactactaactggcagrgctgraggtaactgaacaatttttggtaattgattaatcaaatccttaaaattaagtcttttttttttgattgaaatataggtttaccggactgttccagctgacctcatcatctcaacatcagatgtaactttctgaacctgatcaacattcatttcaacaaccccaattatttcacccattccagtattaacactgtctaagaagtttctaaaggaataactagccactgattggaggctaccttttgtcctgagatgtttctgtgttctctcctcccccttggcaacacaagtatag

SEQ ID NO: 94935 - DNA, 600 bp, Chicken  19866894564855_3
ttcttcaagaatttatgtttagctgctgtctgccttcacttcccctcagatttttggaaatcatgctacagggagagaaaagaacacacaaatactttttggaaatgttagtacttttgcacttgggcaacatcatgatctactttctccttttctctactataaacctgagaactcagttatggtcagcacagtcatgtcatgctttggtttctctccaactgtctgtgttgaaagctagttttcatacctatcacaatgctgaatccaccttatcccactactaactggcagrgctgraggtaactgaacaatttttggtaattgattaatcaaatccttaaaattaagtcttttttttttgattgaaatataggtttaccggactgttccagctgacctcatcatctcaacatcagatgtaactttctgaacctgatcaacattcatttcaacaaccccaattatttcacccattccagtattaacactgtctaagaagtttctaaaggaataactagccactgattggaggctaccttttgtcctgagatgtttctgtgttctctcctcccccttggcaacacaagtatagccctg

SEQ ID NO: 94936 - DNA, 600 bp, Chicken  19866894564864_1
aaaccttttttaacccacacaattcagtgtgggtagaaacgatgcacagtcttccaggaagcttctcatctgctattcacctccttcagaaggaaaggctttttctgcatgcattttaaacaatggatgaaactaagcctgaagactgttttttccttatgcaaaatgaatgaataattaattgtccagggagttatctgtgtagttcccatctctgagaaatgctggcaactgatgaagtcctcaagtctgaaaatgcttcatgaacatgagtacagtctctgcatgaatatttatgtyrtattccacatcgtattcagcctgtaatcccgctgttgctgaagcatgcagctagtagttccaaagctgataatttatggcacatgtgatgacaatacatttaaaataatgcacatgatgtgattgcctgtaatttcaatggaataatgggcaattatacacacacggcatgtattagactagctgtaaaagagtcaggggggtgggctgcaaatattgtaaatgaacaatattcaaaatttggcaagtgctaatagagccattaaaacagctgaaggaaaaaaaagaagtgttccatac

SEQ ID NO: 94937 - DNA, 600 bp, Chicken  19866894564864_2
aaccttttttaacccacacaattcagtgtgggtagaaacgatgcacagtcttccaggaagcttctcatctgctattcacctccttcagaaggaaaggctttttctgcatgcattttaaacaatggatgaaactaagcctgaagactgttttttccttatgcaaaatgaatgaataattaattgtccagggagttatctgtgtagttcccatctctgagaaatgctggcaactgatgaagtcctcaagtctgaaaatgcttcatgaacatgagtacagtctctgcatgaatatttatgtyrtattccacatcgtattcagcctgtaatcccgctgttgctgaagcatgcagctagtagttccaaagctgataatttatggcacatgtgatgacaatacatttaaaataatgcacatgatgtgattgcctgtaatttcaatggaataatgggcaattatacacacacggcatgtattagactagctgtaaaagagtcaggggggtgggctgcaaatattgtaaatgaacaatattcaaaatttggcaagtgctaatagagccattaaaacagctgaaggaaaaaaaagaagtgttccataca

SEQ ID NO: 94938 - DNA, 600 bp, Chicken  19866894564865_1
catttactgcatctattaggtgatttaacctgccctttgattttagcctgggatttagaaaatataatgacttctgaatactgccagtattaatacataacaaactttgtatgtgttaaagtattattttgaagccatgaaaaaaaggcagaaaaatctccttcagaaaaagtctatctcagttctatatggacagacagtgagaagaaacacagcatctctggagagatcattagaaacttatccttttgtaggtagtaaggaagttggaacaggttgcccaaggaggctgtggatgcyccatccctggaggcattcaaagccaggctgtatgtggctctgggcagcctggtctagtgagtggtgaccctgcacatagyaggggggttgaaactcgctgatcactgtggtccttttcaacccaggccattctatgattctatgaagttaatagaatttaataggatttttcaggtaggaattattcaagcagttttaacaaaactgtatgtgaatataaacacataatctttatggaaactgaaaaaaaataatatgaaaatatatttcagcttggatattggtctggatattggtcag

SEQ ID NO: 94939 - DNA, 600 bp, Chicken  19866894564865_2
ctgccagtattaatacataacaaactttgtatgtgttaaagtattattttgaagccatgaaaaaaaggcagaaaaatctccttcagaaaaagtctatctcagttctatatggacagacagtgagaagaaacacagcatctctggagagatcattagaaacttatccttttgtaggtagtaaggaagttggaacaggttgcccaaggaggctgtggatgcyccatccctggaggcattcaaagccaggctgtatgtggctctgggcagcctggtctagtgagtggtgaccctgcacatagyaggggggttgaaactcgctgatcactgtggtccttttcaacccaggccattctatgattctatgaagttaatagaatttaataggatttttcaggtaggaattattcaagcagttttaacaaaactgtatgtgaatataaacacataatctttatggaaactgaaaaaaaataatatgaaaatatatttcagcttggatattggtctggatattggtcaggatcttgcctatagccccagcagcaggtggtcagttagaccatcagaggctctagaatgcaggatcaatgaaggtgtgct

SEQ ID NO: 94940 - DNA, 600 bp, Chicken  19866894564869_1
atttacaaagaatttactgataattactgaaataattatttacagatactttccatttcagcttcacacctcactgtccaatagattagagagtattcctggttagctttgttcatcagtgtattctttatttgcatattccctttaaaataccagcgcctacactgagctgcgtagatagatgttctctccttaaagcagtaaataagtatgcaagagttctttacactggtacatatttcacaatgcagttttaaagatgatttcactctagtcagcaattttataatttcagatatytcctcctgcattcatcacagttgaatgaaaaacattcatagacaacacagggatagggacatatagagacatacgtkcacaaaagtgggaagctaatcatgcctctctctactctgtacttttattttctgtcaacttcatttgttgaagattcagttcttataccctcttaggccttaaatgacacatcttcatttcactttcatagatcagagacccacatttttcttttatatctcaacttcatagttagccctatcattccctattttccatacctccctataaaatgtgatgata

SEQ ID NO: 94941 - DNA, 600 bp, Chicken  19866894564869_2
ccaatagattagagagtattcctggttagctttgttcatcagtgtattctttatttgcatattccctttaaaataccagcgcctacactgagctgcgtagatagatgttctctccttaaagcagtaaataagtatgcaagagttctttacactggtacatatttcacaatgcagttttaaagatgatttcactctagtcagcaattttataatttcagatatytcctcctgcattcatcacagttgaatgaaaaacattcatagacaacacagggatagggacatatagagacatacgtkcacaaaagtgggaagctaatcatgcctctctctactctgtacttttattttctgtcaacttcatttgttgaagattcagttcttataccctcttaggccttaaatgacacatcttcatttcactttcatagatcagagacccacatttttcttttatatctcaacttcatagttagccctatcattccctattttccatacctccctataaaatgtgatgataattaatcatttttggatgaatacagtcatacaattctgattttgaagggtatcatgactatattaatgaaggcaatc

SEQ ID NO: 94942 - DNA, 600 bp, Chicken  19866894564872_1
tctaagagcgtcttattcctcagattcaagtacttttcatcacagctctttttgacaaacactgtcaatgtgagcattgtgcccaggttttcatccaataactacaacagtgttttacattatttgcgatgtctctctaacgtatgttctccttagtccatttgcacatctaggactaatacagggctctgaaattttccaggtaggttgtatttctcttcctattaatgttagaagctgctggcacaatttaaggcaagacgcaggagaagcagagagtaactgaagctatataagcakctctgctaatgtgtttgaaaccagtttaaccatcttcctttcattaacatctcaaataaggtgtccaatagcctttggttatttctgtaactatttcctttcagggtttttttttttgttgttgttgtgtttgtacagcacctgcaactgaaagagctagagcaaaaattgaagctccttggcgctgcagcaatttattcattaacaggatgaatgtcaggtttctcagttcttaccagtttaatttgtgctctgccgctggacttttggcccaacactttgagtttcttcttctggatt

SEQ ID NO: 94943 - DNA, 599 bp, Chicken  19866894564876_1
  misc_feature (1)..(155): n is any nucleotide
nnnnnnnnnnnnnnnnnnnnnnnnnnnnnnnnnnnnnnnnnnnnnnnnnnnnnnnnnnnnnnnnnnnnnnnnnnnnnnnnnnnnnnnnnnnnnnnnnnnnnnnnnnnnnnnnnnnnnnnnnnnnnnnnnnnnnnnnnnnnnnnnnnnnnnnnnnnatttcattacgttagtggtgcctagcctagagttggaattctgttgtagtcatgatggtgggatggataggagtctggaagatgaattcataatgcttcgttatgatgaaatatcaaagtatgttggaaggtcaccttgtgttgyataattatatattcaaaagaatttaaattctttcctcagccttcagtgaatctgagacaacagcagcgatgggaaaaacctctcctaaaaatcccaagaatcatacttgttttggcatgacactgcctaaggtgatttgcgaacaaggctgactttgccaagctttcacattaacacacggttcagtatacgttttgcaaccttaaatctgctttccatttgcatggatagaattgcctgattgtatacattttgttagcttaaagggctccaatattccaatactggaaccaaaatga

SEQ ID NO: 94944 - DNA, 600 bp, Chicken  19866894564876_2
atgggaaaaacctctcctaaaaatcccaagaatcatacttgttttggcatgacactgcctaaggtgatttgcgaacaaggctgactttgccaagctttcacattaacacacggttcagtatacgttttgcaaccttaaatctgctttccatttgcatggatagaattgcctgattgtatacattttgttagcttaaagggctccaatattccaatactggaaccaaaatgaatttctcgaagtgatggaggctgtatgttaattacttcaacaagtcattcagaacagtgtctaaagtcrttgctttgtctgactttggaaggtatgactgtatctgctgccacagtagtactgggattgtagctactgaccatcctgaaaatcaggctcaaaactgacagcagtagattctcatatctatgtgaagttgtttcactgtttttttgtacaagccagtattgccaggtaccttaaagcttacgaaatacagaaatctgtaggtatgagttgaagtagccttgtcaaagagacagcaattaataagtagcatgcacacctaagaagcagtgcataccgctatttatcacctctccagagtct

SEQ ID NO: 94945 - DNA, 522 bp, Chicken  19866894564882_1
atgtctatgcataatgaatgaacatttcctgttttttaccagtctgcagagccttctcctctatccagcaaggggcaaatgccaggcacagtttgctaatatactatgtcatctggcagaaaagctggcgccctgggcagcatcttgctggagacatgagatactcaggcttcaccaacagatcctttctgaacttgacttttcagcagctcctgttataatgcaaatcctgaccctggtatgcaggattatgttagaatgaatgtctgcccagattaaatgctgtttggtgcaagcacscactgctcccaactccagctactcactacctcacaataagagcatgcatctcagctgttactccgatgctgcagccctccaccccttgcctctaactgcagtctccaagcagttatttctcttcagtgggctgtctgatctccaactgcacaggctggattttccatgcagatcctggttcacttctgtgtaaccaaccttacagtgtaggtaacctgtgta

SEQ ID NO: 94946 - DNA, 599 bp, Chicken  19866894564884_1
  misc_feature (1)..(9): n is any nucleotide
nnnnnnnnncaaaagcaaataccagatattatagcagtaaaaaaaaaaagtcagtggccaacaaactgctgcatgtgaagtcatctcttctctgctagctgaacggtgtgtgcctttcaatgagtagaaacccagtgcccacatccagcctacagaggcagtaagagtggtataatggtgaggagctcatggagcctagaactccacaatatgtttagataggcgcatacattcatcggcatcaggtgtaaaatagaagaatgcatatcagatcttttcaaaattcttaatttgggtacrattttttgttctgttttcttttagtttgttgttgtgtttggcttttgtgtgggttttttttccacttctatcagtgctaccgtttcagacagcccatgtttttgtcaggcaacctgagctgctcctctgagatacctcagaggactgtgatattcttgcagcagattttccctttcaacagtcaccttgatgtagttcagccttttaaattaaaagtacataaccatgcttccctatgcttcagaaccagaaaaaaataaaatttcattttacaaagatgctttgtgaccaaatgaaac

SEQ ID NO: 94947 - DNA, 600 bp, Chicken  19866894564884_2
atcagtgctaccgtttcagacagcccatgtttttgtcaggcaacctgagctgctcctctgagatacctcagaggactgtgatattcttgcagcagattttccctttcaacagtcaccttgatgtagttcagccttttaaattaaaagtacataaccatgcttccctatgcttcagaaccagaaaaaaataaaatttcattttacaaagatgctttgtgaccaaatgaaacctccagcactgctcagcaaaatggagacaaatttcctttttttctggttcagtacaaatgagcttcacarggcaatcttgttaaaagtgatgctgttttcaaaaaagtctcagtccctgccaaacttcatcccctcagaatgacattttatcaaggagaagaaagctggattttgggcgacagccactgtgctttatccgactgctgctgatcacacatgcttttgtactgagtgaagtgcaatctgacatcaaaggtcatttcatgtccctgctcctaagaggccaagtggagatgcggagagttcttcattgttgtgcaatgattgagcagcaacttgaatttttgtggtatcaacaaaaactcacaa

SEQ ID NO: 94948 - DNA, 599 bp, Chicken  19866894564887_1
  misc_feature (1)..(77): n is any nucleotide
nnnnnnnnnnnnnnnnnnnnnnnnnnnnnnnnnnnnnnnnnnnnnnnnnnnnnnnnnnnnnnnnnnnnnnnnnnnnntgattttcttgggtagtagtggctccctctaggccaaatgtctttcagatgtagtgaaatggttgtattttgaattagtgtttggaaatatgtgttaactatggttgcatctttttatagtatatagaggaaaataaaaaaaatgctatctgttctatgattccagaaacagctccatttgccatccattagtaacacctttccattccttctgtaatgtaakcttgtgcttatgatgtaaaagtaattgaatcaaaaaaacttcaaagaacattatgtactactaastcagataactagaatttagagaatttcatgactgagaggacaaatttgaagtatgaaatagtttgctgcttgtcacacaaaatatctgatatattcagtaaatgacagtcaaataattttttaaaaattgttctgatttctggtcctacataaccctgtgactgcaacacagcaaagagttggactttgaaatgagtatgaagtctagaaatctatcacagagagttttttcac

SEQ ID NO: 94949 - DNA, 599 bp, Chicken  19866894564887_2
  misc_feature (1)..(12): n is any nucleotide
nnnnnnnnnnnntgattttcttgggtagtagtggctccctctaggccaaatgtctttcagatgtagtgaaatggttgtattttgaattagtgtttggaaatatgtgttaactatggttgcatctttttatagtatatagaggaaaataaaaaaaatgctatctgttctatgattccagaaacagctccatttgccatccattagtaacacctttccattccttctgtaatgtaakcttgtgcttatgatgtaaaagtaattgaatcaaaaaaacttcaaagaacattatgtactactaastcagataactagaatttagagaatttcatgactgagaggacaaatttgaagtatgaaatagtttgctgcttgtcacacaaaatatctgatatattcagtaaatgacagtcaaataattttttaaaaattgttctgatttctggtcctacataaccctgtgactgcaacacagcaaagagttggactttgaaatgagtatgaagtctagaaatctatcacagagagttttttcactaatgcacataatattttcccaaacttgttcagtgttcccatgttaagctaagtggcattacaaa

SEQ ID NO: 94950 - DNA, 600 bp, Chicken  19866894564888_1
acgtctttcttttttgaaaaaagacagaactttaaaggctgttaaaaggagatataatcatatcatgcataattctacttaatgtagtttcctccacaagtgttattctacatttcttcctttgacagtatttcttttaagtgccagtggcctgcatggcaccagaagtgaggctgctacatgtaacccatcctgagcagaagtcaggtcaaaatggcaactctggtgttttttgtgttgttgttgttgttgttatttgcatgcctgataaaggaaaaatcccacaaacattcaaaatgycccttatagtgtgagctgctcccacatccttttccttctttgatcggggcttttaaagagatcatctttattggacttaggagttcagcctcctatttttggcacatcatccagacttctgactttgcawggaaagggtttgagcttataaagactactgatattataaggtatgtgagttgtgcccagatccaaatactcaggagtaccgaaggcttgcagtttctaggtgtacaccccgttatctggagcaagcatcacccagaacactgtctctgtgaaaatgttctccctatcctt

SEQ ID NO: 94951 - DNA, 523 bp, Chicken  19866894564888_2
tttcttttaagtgccagtggcctgcatggcaccagaagtgaggctgctacatgtaacccatcctgagcagaagtcaggtcaaaatggcaactctggtgttttttgtgttgttgttgttgttgttatttgcatgcctgataaaggaaaaatcccacaaacattcaaaatgycccttatagtgtgagctgctcccacatccttttccttctttgatcggggcttttaaagagatcatctttattggacttaggagttcagcctcctatttttggcacatcatccagacttctgactttgcawggaaagggtttgagcttataaagactactgatattataaggtatgtgagttgtgcccagatccaaatactcaggagtaccgaaggcttgcagtttctaggtgtacaccccgttatctggagcaagcatcacccagaacactgtctctgtgaaaatgttctccctatccttggcatccttttagtcgggcagaagccatgcacagtccaagtgctccaaagcat

SEQ ID NO: 94952 - DNA, 599 bp, Chicken  19866894564897_1
  misc_feature (1)..(100): n is any nucleotide
nnnnnnnnnnnnnnnnnnnnnnnnnnnnnnnnnnnnnnnnnnnnnnnnnnnnnnnnnnnnnnnnnnnnnnnnnnnnnnnnnnnnnnnnnnnnnnnnnnnnccccattaataatatatgaacaaaatgtcagtgaggtctacaaaacttgcgtgccccaagtggttgtgaaagtctagctgaaaccatggtcctgcaggttatatacctcccttttgaaccataaacccttgatgcttatatttgttctcattttttttttcattgttctctaaaataagatcaagaatatatgaatgaarttttctttgctgtgtctggatatctgtttcagacattgggaactgaggcagaaaaagagcacatgaactgctgaaggtcatacaggtatggcagcacgtggggaagagagagcacatttccaggctcrggttaatgttaagcacaggaccgtgccacttccctaagttggggctaatttcatcgacagtatcagtaacaatggggagaaagagatttcaaaagggtgattatttctctctagtcccactcaaactagctttgtgagtacaatctcctgattgtgaacacttgcagtgct

SEQ ID NO: 94953 - DNA, 600 bp, Chicken  19866894564897_2
cagtgaggtctacaaaacttgcgtgccccaagtggttgtgaaagtctagctgaaaccatggtcctgcaggttatatacctcccttttgaaccataaacccttgatgcttatatttgttctcattttttttttcattgttctctaaaataagatcaagaatatatgaatgaarttttctttgctgtgtctggatatctgtttcagacattgggaactgaggcagaaaaagagcacatgaactgctgaaggtcatacaggtatggcagcacgtggggaagagagagcacatttccaggctcrggttaatgttaagcacaggaccgtgccacttccctaagttggggctaatttcatcgacagtatcagtaacaatggggagaaagagatttcaaaagggtgattatttctctctagtcccactcaaactagctttgtgagtacaatctcctgattgtgaacacttgcagtgcttcgctgcttctatggtaaaaatgttatttgcctccaggctatttcagcagaaaaagaaacgtcttgctttgttagaaaagtctatcttgggcaaatgaatcactcctacgtgaccataagcagtacaga

SEQ ID NO: 94954 - DNA, 600 bp, Chicken  19866894564898_1
cccacagccctggcaaacctggcctctagttctgaatcagaagaacagataagggtttgcttagcttccaaatcaatcctaacccttttcctgttccaaaagtttgtaagcagacattttattttccactctgaagagctgatgtgagcatatgtcatcctcaatctgtcacatttttatccagtcaggaaatgaaattcataacatgtggctttcatggtcaattggcaaaacagggcaggagatcttgcactaaaattaaagagtgaacagaatctgcaaaataactcttttgtatakaattattctgctgtgaggtggagacatcaggtcaggccatgatgggatgatgcactgcctcagttagaaatccagctgttacaaagtgtgacaaagtgaaaatactgagccaacatgttacttaaagagtggataatgctcatcacactcactaaagaccaccacagttcctctcctgatttggacactactgttggaaattaaatatctgcatctttttcctctgaatttattttagttccatctttgcaacgaagatgtcaatcccagatatgcatgtgcttgtgagcctgaataact

SEQ ID NO: 94955 - DNA, 600 bp, Chicken  19866894564905_1
aaaatcagccacctcccaaaactgaacaggaaacacgtcctgcaccgtgattttctgttggtgcattagatatgagctctgtgactcttctatatctcattctaagatgcttgcccatttgaagaccatttgaatccgagaggtctgtctctgaatgttaggtcttgcaacactaaacctatgtctcctttatacatcacctctagcccttccacccctatgccttcattgcaaaactacttttcctaccacaagaacaattgtctttaaaaaattcagcaaattagttattcacttaarcagtatcttctctctagcatgcctggcagcagaaaagcaacctcaaagtaggtcatgaactatactattgatcaggataaaaaaaaacaaacaaaaacaaaagtttacttcaagtatagttgttttggaataacaatttgtgttttaaaatattttaggaggagtcgtaggcaagacgtgagacatggaaaccctctgactcagtgccgaggtttcaacctgaaaggtactgtaatttagagatccttatgctatataaagaatgcatggctttccttgtatgattcattgcagctcaca

SEQ ID NO: 94956 - DNA, 600 bp, Chicken  19866894564905_2
ttacttcaagtatagttgttttggaataacaatttgtgttttaaaatattttaggaggagtcgtaggcaagacgtgagacatggaaaccctctgactcagtgccgaggtttcaacctgaaaggtactgtaatttagagatccttatgctatataaagaatgcatggctttccttgtatgattcattgcagctcacatctgtgtggtttactggtaaagcataattattttccaagtctgaatctttccttgcaattatatgaattctgcataaatatgataaaatgataaatgtagagtkcaacatacctgaaataagaagctgatagtattgactagaaacaggtatagtgaatttgagtgcctttgtaagtcttctaagtctttattaatttctctatatgtgattaaggctcagacctgaacacttagagtagaatagaatttgaggttatattggtttttggagcacatctctcagcaggttcctttccattgtcattattcctttctccttctatctagaaaaatgaatttcttcaaacctctttatgaattcccttatttctagttgtgcaacttcttagccaggctggcacag

SEQ ID NO: 94957 - DNA, 599 bp, Chicken  19866894564906_1
  misc_feature (1)..(106): n is any nucleotide
nnnnnnnnnnnnnnnnnnnnnnnnnnnnnnnnnnnnnnnnnnnnnnnnnnnnnnnnnnnnnnnnnnnnnnnnnnnnnnnnnnnnnnnnnnnnnnnnnnnnnnnnnntgctgctgtaagcaaatgtaggacctatggacaaatgtatacccagtaaaagagcagacttaaccagcagagctatgccagtgttaaatcatggttcactttttgttgagttgatcaaagcagatgaggaagaacatacaagcttttttccatgagcttatttatgattctaaaaattctgtagtgacactaayttatattttcaatgattttgatttatcctaaaggcaaagttgaagctcagagatggccctaatgatgttgtgtttagcattacaacccagtatcaggggacttgccgttgtgcaggaacaatatatctctggaactgggatgacaaaatcatcatatcagacattgatggaacrataaccaagtaagtattgtttttcctttcttttcttygtatttgatacattatcttgctttattgatgccatcttacttttcaaagtaagataaagaagcctgatttaagatgactgctgaagaa

SEQ ID NO: 94958 - DNA, 600 bp, Chicken  19866894564906_2
agagctatgccagtgttaaatcatggttcactttttgttgagttgatcaaagcagatgaggaagaacatacaagcttttttccatgagcttatttatgattctaaaaattctgtagtgacactaayttatattttcaatgattttgatttatcctaaaggcaaagttgaagctcagagatggccctaatgatgttgtgtttagcattacaacccagtatcaggggacttgccgttgtgcaggaacaatatatctctggaactgggatgacaaaatcatcatatcagacattgatggaacrataaccaagtaagtattgtttttcctttcttttcttygtatttgatacattatcttgctttattgatgccatcttacttttcaaagtaagataaagaagcctgatttaagatgactgctgaagaacatttgttaagttatgagaaatacttgttgctttggtttaaatttgcacttrtgtctacagcaaactagaaaatgtctttagcattcttgcattattctttaaaatgttcaccatgtgactactgcccttatagtcagacttgtctaggtttagcaagcatatggtagcttggga

SEQ ID NO: 94959 - DNA, 600 bp, Chicken  19866894564906_3
ttgagttgatcaaagcagatgaggaagaacatacaagcttttttccatgagcttatttatgattctaaaaattctgtagtgacactaayttatattttcaatgattttgatttatcctaaaggcaaagttgaagctcagagatggccctaatgatgttgtgtttagcattacaacccagtatcaggggacttgccgttgtgcaggaacaatatatctctggaactgggatgacaaaatcatcatatcagacattgatggaacrataaccaagtaagtattgtttttcctttcttttcttygtatttgatacattatcttgctttattgatgccatcttacttttcaaagtaagataaagaagcctgatttaagatgactgctgaagaacatttgttaagttatgagaaatacttgttgctttggtttaaatttgcacttrtgtctacagcaaactagaaaatgtctttagcattcttgcattattctttaaaatgttcaccatgtgactactgcccttatagtcagacttgtctaggtttagcaagcatatggtagcttgggaactgacttgtgctgtatagctaccactaatggctcag

SEQ ID NO: 94960 - DNA, 600 bp, Chicken  19866894564906_4
gatggccctaatgatgttgtgtttagcattacaacccagtatcaggggacttgccgttgtgcaggaacaatatatctctggaactgggatgacaaaatcatcatatcagacattgatggaacrataaccaagtaagtattgtttttcctttcttttcttygtatttgatacattatcttgctttattgatgccatcttacttttcaaagtaagataaagaagcctgatttaagatgactgctgaagaacatttgttaagttatgagaaatacttgttgctttggtttaaatttgcacttrtgtctacagcaaactagaaaatgtctttagcattcttgcattattctttaaaatgttcaccatgtgactactgcccttatagtcagacttgtctaggtttagcaagcatatggtagcttgggaactgacttgtgctgtatagctaccactaatggctcagtgtggaataggtactaattctctttcaaaatggctaagacattctgcagaggtgtttctgtaaatactcattgtaaactgtatattcattaatagttgtctgtaacaaaactcatacacttagtttcaactatctccaat

SEQ ID NO: 94961 - DNA, 600 bp, Chicken  19866894564911_1
gatggggcagatggccccagtcacaccttcctgctggcaggagtgttggcaggctgtgcttcagggctgccacctcagcttcatgcctccttgctgggagctctgggcacagcctgcagcaggtactttacaaatcatcttctgcccactagaggacagaccaagcttatgcctgcccaggctgtcagctccagcagtctctttctggaggctgggccctttgaggggttaaagccagctcttgtgagccttgaagaatctagaatcacaggggattgatgctgtttgacccaacctgcrctgggtagcagtgggagctgaccattactcaaagccttttaattctcagctaagtgagacctggtgactcatggccagtattgctgcatagggtgcattagcaaaggcttagggtctgtttggttcatgcaaagaaatatctgtaaggttatgtgataaaaaaaacacatcttcacacccatggaggagtacagagagacgtcaggcaggggacccaaagtaatacctcgcctcaggacagtggtgggtggaaacctaaactgcatcctcatagaaagggatgagctgctctgggctcct

SEQ ID NO: 94962 - DNA, 599 bp, Chicken  19866894564916_1
  misc_feature (1)..(201): n is any nucleotide
nnnnnnnnnnnnnnnnnnnnnnnnnnnnnnnnnnnnnnnnnnnnnnnnnnnnnnnnnnnnnnnnnnnnnnnnnnnnnnnnnnnnnnnnnnnnnnnnnnnnnnnnnnnnnnnnnnnnnnnnnnnnnnnnnnnnnnnnnnnnnnnnnnnnnnnnnnnnnnnnnnnnnnnnnnnnnnnnnnnnnnnnnnnnnnnnnnnnnnnnncaaaacaaaacaaaacatcgaatttacggctggcagaaaaatgtgacatttaaaatatctacaaaatggaatgaaaaaaataaaatcttctaatctttratgacacctatggaaagaaaggtcatttcactgtaacaaatatcattattgtgtctaggccatctccagtggtaaatttactgtagcttacacaaacttcttagtaatcttgctttcgccttaagcaaaagttaaacagaaaaccaaccagtgggtgggggaaaccttcttcagttctgttgcctttggaatatttgcaatcctatcacaggaattcagcaccataagaagtaaaataatagaagaaactcaaataatcacattaagtatacagaccttagacataccctagacttttc

SEQ ID NO: 94963 - DNA, 600 bp, Chicken  19866894564923_1
gggatttaccaccgggtgcttggcaattagaggcaggagataagattaggacagccagaggtcttcttggctgcaggacacaaaggacgggctcttttcatgctctagatattcacacctgtgtgtagagaccacttccatgtgcagttgtgacgctacagccgtgcaggtgcccatctcccacagcatccctcggtgcatccttacccttccggtggaggaaatccagggtcaccgtccctggagacgttcagagccgtgtggatgtgggcagtggacatggtggggatgggctggagytgggcttggggatccaaggggtcttttccaaccttaacgattccatgattctccataacgtacagtcctgtccttctgttcacaaccaatcaggaaaagaaacagtttggtgttaaaaggaacagcaatcctacgtttctcacaacagtacaacgggaaaacatttccttgtgccaaacaaactatgggactcagaactaagaagcagacagcagtttccagcagcttttcttcttctgcctacctgtttgttagttaatagacctcactgcaggttttccactggtttttctttttgca

SEQ ID NO: 94964 - DNA, 600 bp, Chicken  19866894564923_2
aaactccatatctcataccagagcagtctgcccagggctccatccagcctggctttgaacacctcgagggatggggcatccacagcctctctgggcagctgttcctgcacctcaccactgtcttggtaaagaacttcccccatgatatccaaccataatcttccctcttcccttcctatgcactctgtatgtaagagacatgcagaacttgggttatttcgttcctggaatgtcccagcactcacacatccctgcaccactgcagccacacagacatggcaggtttgtaacaggcacttmacagcgctgcctcttctcaactcagcccaacccacctctagaagcacccagctgtgacaagtcatccatcttcagcctcacttctgtactcagctaaggtcgctcaccgacacagaatctgacagatcttaaaatataaattacaggattaaataagattttattgtcacatttaactgctttgtcagagatgtacattttgcaggtttctgtgcggaataaaaataaaaccagagttgccatcttgtcaattctcatctggacacgcgcacgtcatggacagccgagctgcaggcgctc

SEQ ID NO: 94965 - DNA, 600 bp, Chicken  19866894564955_1
ggctggactactacagcagcgtctgtgtatctttcatcccctgaatagggctttccaatctaatctgaccttggatcatgctgagtagaaaaagttccataacaaaagagaaggtagtaatggtaagtactcttctgctccactttctttttgctttctgctttatccacagagcacgtaagtgagagagtaataatatacatcagagaacagagccaagtaaagaaagacgacattctggcaaactaagggcaaagaagagatatcgaaaagaactgtagctaaaaaattgaaaacaawtttttccccgttctttttttctcccctctcagttctttctcctcagccgcgagatctgtttaaatcctgactgccactatcaaagcagaatgacactagttcaacttaagcgcttgtggcattcccctattgctagtgacagacaggtctgggtttgctcccgagctgtaagcaggcttcagctctattgtaatggatctatagaccatagcctgatgaagaacattagacatttgagtttcagagagttcaactcaggggtcatcccaaacaatagagcatcaaaaacagtcactgctg

SEQ ID NO: 94966 - DNA, 600 bp, Chicken  19866894564956_1
aagacctcaaaatgcttgatgattttgaggatcagactgcggctcaaaagccaccattgctatgacatatttttaagaataataggcaaagtagatcagtattcacaagcatgtctatgttcacatgctactgatagcctttattttttaaaaaaacattatggacttcaagtctggtaatgtttctaacagataggaaaacatgaagttctgcttataccaattttagaattacatctgtgaagtgtctggagcctaactgtagggttgagttctcccctccatctgagtagtgccacrcatttgggcatctctgctattggttcattttcacagagccttagtaacattacatctctgagacagccagaacatgcaaaatattaaataaaaacacaactgtgggcaaagggattcacctgcacacagatgcatgcacattcaactatartaatttccttgtaagcggggctaaaaaagtgatgaaaaggatgaaaggcgaaagtagcatgtttgattcttacagaggtgatttatctgggttgtatcacagaggcaagacttcttttttagaaattcttgatttattttgctttttaa

SEQ ID NO: 94967 - DNA, 600 bp, Chicken  19866894564956_2
aaaaacattatggacttcaagtctggtaatgtttctaacagataggaaaacatgaagttctgcttataccaattttagaattacatctgtgaagtgtctggagcctaactgtagggttgagttctcccctccatctgagtagtgccacrcatttgggcatctctgctattggttcattttcacagagccttagtaacattacatctctgagacagccagaacatgcaaaatattaaataaaaacacaactgtgggcaaagggattcacctgcacacagatgcatgcacattcaactatartaatttccttgtaagcggggctaaaaaagtgatgaaaaggatgaaaggcgaaagtagcatgtttgattcttacagaggtgatttatctgggttgtatcacagaggcaagacttcttttttagaaattcttgatttattttgctttttaataaccattttaaagaccactccttccttgttcttcagcacctgcagtgcaccctacacatttctgacatgatagtattaagaaactttccagcacatccataacttcttcttgctgagaagggtgaagatctgaaggatctcatttcaagg

SEQ ID NO: 94968 - DNA, 600 bp, Chicken  19866894564973_1
tcatcagacccatctctggagatggtttttgttctacagctacatgacttctttcttaatccgtgcctaatagcgttcaattttacagttcccgctaattaataggattattaattagtattaatagatatggctgtagcccaatgtcatcaagtgtaatggcttccatttattattatttcaggtgaaatgccccatagctgaatttttgccatactgcctttttattctttaagcttcaacaaaatctgttgtcgaggggctctgatcttaaagaattcgctaggcacctaattgcaygggcatgcaaatagccctcaataaaaaccacattctggaagcatgcagagggtgaaggagcaatggaagcacccctggaggtcctgaggggtctcagggtgtttggcagagccctcctggaccggctttgtgcaagcagcagctctgccaggagcggctctgctgggctccgcaccgaaacacgcgcataaaaccttacagcccttgtaaatgagtaatggctttggaaagagccccgttaaaagagcgagcaatgtcagccctatggagttacccattaaactgcaggcagtacccaga

SEQ ID NO: 94969 - DNA, 600 bp, Chicken  19866894564977_1
gagatgagtgttagaattaatactcagaaagtgccaggtgcattagcttgctgggttttaatcactacactgttgctgttgatccctttcttacctctgtggagatgtatggcaaaaaaaaagctgtctctatcttggtctcagtagcagaacaaaatgattcctgttagggttatataactcatgctttatttcaagggtgtcccatgtgggcaatagattggatatgaagttatttttattttcacatatccatctgccacgattcatgttttatcaaagcagtttacatgattcccrgcaaggctgtgaaagagcattggtttctgaagttaccatggataccaagcaacaagttttcattctatgacgtgataattttttacaattctgtctcaatttatttttttcctgaaactaacttcttcatccagttctcaatctcaacttgtgacaaaaccttgacaaaaatgactgagtgatctgaatgagaggattgtaatgcatgtaaccacaacaggaacagcacatgaccaaaccgtgtatatgtcattttagttgggctgaaatcagcgagtacgctcggtgtttttctgtcag

SEQ ID NO: 94970 - DNA, 600 bp, Chicken  19866894564979_1
tgtggcaggggtggctcatgatccttgaggtcccttccaatctgggccattatgtgattctgtggaggctggagtttcagcatcagtagttccaagagctgctgctctgtctgtattactgagcctcagatttcaacaaccacaggctgcctttgtcaccacaggattactttacatgagctagaggaggcttctctatacaaggtgcaagaactggggctttaatcccaaccttttctgcctttcccactcacatgctgggagagtatcactgttcctacagctgcttcctctgtgagktctgacatgaaggaagaacttacatttattctgctcattccctgtctcatgtttaaggtgtgaaactaaaatgcctkttgcccacagcattcctgatttcacttttggtcagtagtcacgcaccttggctggggggtaatggaaaagagaatagtgtcctttttcttcagctacactgggagaacaccctggaaagacctacctgaaaggtgatggtgactacataacaaactggatataattatttcccacactgtctgcatttttgatccctataccactttgcatagccaccttgag

SEQ ID NO: 94971 - DNA, 600 bp, Chicken  19866894564979_2
cagcatcagtagttccaagagctgctgctctgtctgtattactgagcctcagatttcaacaaccacaggctgcctttgtcaccacaggattactttacatgagctagaggaggcttctctatacaaggtgcaagaactggggctttaatcccaaccttttctgcctttcccactcacatgctgggagagtatcactgttcctacagctgcttcctctgtgagktctgacatgaaggaagaacttacatttattctgctcattccctgtctcatgtttaaggtgtgaaactaaaatgcctkttgcccacagcattcctgatttcacttttggtcagtagtcacgcaccttggctggggggtaatggaaaagagaatagtgtcctttttcttcagctacactgggagaacaccctggaaagacctacctgaaaggtgatggtgactacataacaaactggatataattatttcccacactgtctgcatttttgatccctataccactttgcatagccaccttgaggttttattccttctgcttgggactggaacagcatgaaccactcatccagagtaacaggatggcactcattcaggatg

SEQ ID NO: 94972 - DNA, 600 bp, Chicken  19866894565002_1
ttcagttgggtaagcctcagatcagcagcagggctcagtgcgatggctctgtggatgaaggactccatgatgccttgcccttcccatgagcaattcctgcagtgctgcgggaggtgcaggatgcatgaagctgtattcctgcagccctcacctaagcatgtccattcattgcaggctcatgggatgaactgagctttggtcagatttgattgctggaccttaggattcaagtactcactagcggtcatgttgcagtcccattgactgttgtaactgcctttggtttgtctacctttgagyrtgagcttcagatgactgaggtcaagatgttgcaatcctacagagctccaaagctcttggggaatctgtagacgttcacaggtcttggactgcatccacagattttctttcaaaggctgyttttttttttttaaccacttcatattaatgttctttctaaagctgttctgaaagaactgatgcctggagatattctcttcggcttttgctaggtgttcatctcctaccaacaagaacaggctgcttttgtgcgtgtgatcttgtaatagattgcttttgccccatcgtaggaaacatcct

SEQ ID NO: 94973 - DNA, 600 bp, Chicken  19866894565002_2
tcagttgggtaagcctcagatcagcagcagggctcagtgcgatggctctgtggatgaaggactccatgatgccttgcccttcccatgagcaattcctgcagtgctgcgggaggtgcaggatgcatgaagctgtattcctgcagccctcacctaagcatgtccattcattgcaggctcatgggatgaactgagctttggtcagatttgattgctggaccttaggattcaagtactcactagcggtcatgttgcagtcccattgactgttgtaactgcctttggtttgtctacctttgagyrtgagcttcagatgactgaggtcaagatgttgcaatcctacagagctccaaagctcttggggaatctgtagacgttcacaggtcttggactgcatccacagattttctttcaaaggctgyttttttttttttaaccacttcatattaatgttctttctaaagctgttctgaaagaactgatgcctggagatattctcttcggcttttgctaggtgttcatctcctaccaacaagaacaggctgcttttgtgcgtgtgatcttgtaatagattgcttttgccccatcgtaggaaacatcctt

SEQ ID NO: 94974 - DNA, 600 bp, Chicken  19866894565002_3
atgcatgaagctgtattcctgcagccctcacctaagcatgtccattcattgcaggctcatgggatgaactgagctttggtcagatttgattgctggaccttaggattcaagtactcactagcggtcatgttgcagtcccattgactgttgtaactgcctttggtttgtctacctttgagyrtgagcttcagatgactgaggtcaagatgttgcaatcctacagagctccaaagctcttggggaatctgtagacgttcacaggtcttggactgcatccacagattttctttcaaaggctgyttttttttttttaaccacttcatattaatgttctttctaaagctgttctgaaagaactgatgcctggagatattctcttcggcttttgctaggtgttcatctcctaccaacaagaacaggctgcttttgtgcgtgtgatcttgtaatagattgcttttgccccatcgtaggaaacatccttgacttcaggattcacactcattccctcaccctcctgcaggacctttttctattttctgcagcaatgtgcgtaactggcattatttctttccttcatgccttttccaagagttctcacct

SEQ ID NO: 94975 - DNA, 600 bp, Chicken  19866894565013_1
gttacatgcaaaatttataaatgagatgttcttaacagtgttctttttttactacgaaatgacatctttttcttccaaactgaaacaaagtattttggttttgatccaatgcaatttctttttcatctgaagcttctcatttatttacatatttatttaggtggttgccacaaacagctaaggaggctgagagctcagagatcttacagcagggagaggagtaatatcagggtgaaagtgacattgagtgtcagggttgcattcctccctacagaggaatctttactgtctccctaggamacaatgtatagatagaaaacttgtgtaccaagacagtagtaaaaggaaatactatttctaggaggaaaggtattgaccctgtgccaccgaatcagaaaagggaagtgattttattgcaagtcattggtagtcattggtgatgttttcatcagcagatgarttcccctaatcgtctgattacacataggaacagrtatttaaacatcctccttttgggagacaccacctccctctcagaaaactaagacaagctacgcattctgtatatcacaacttagcagatgcagctcaactcagagc

SEQ ID NO: 94976 - DNA, 600 bp, Chicken  19866894565013_2
gtggttgccacaaacagctaaggaggctgagagctcagagatcttacagcagggagaggagtaatatcagggtgaaagtgacattgagtgtcagggttgcattcctccctacagaggaatctttactgtctccctaggamacaatgtatagatagaaaacttgtgtaccaagacagtagtaaaaggaaatactatttctaggaggaaaggtattgaccctgtgccaccgaatcagaaaagggaagtgattttattgcaagtcattggtagtcattggtgatgttttcatcagcagatgarttcccctaatcgtctgattacacataggaacagrtatttaaacatcctccttttgggagacaccacctccctctcagaaaactaagacaagctacgcattctgtatatcacaacttagcagatgcagctcaactcagagcctttttgtctaacgacaagatttgagcctgccacaaacatttacaacagaccaacagagagagtagctgattaaaaacactgaggtaagacctgataatctgcaacctgatctagcatgactttcttcatgagtactacatacattatgtggccacgcta

SEQ ID NO: 94977 - DNA, 600 bp, Chicken  19866894565013_3
tcagagatcttacagcagggagaggagtaatatcagggtgaaagtgacattgagtgtcagggttgcattcctccctacagaggaatctttactgtctccctaggamacaatgtatagatagaaaacttgtgtaccaagacagtagtaaaaggaaatactatttctaggaggaaaggtattgaccctgtgccaccgaatcagaaaagggaagtgattttattgcaagtcattggtagtcattggtgatgttttcatcagcagatgarttcccctaatcgtctgattacacataggaacagrtatttaaacatcctccttttgggagacaccacctccctctcagaaaactaagacaagctacgcattctgtatatcacaacttagcagatgcagctcaactcagagcctttttgtctaacgacaagatttgagcctgccacaaacatttacaacagaccaacagagagagtagctgattaaaaacactgaggtaagacctgataatctgcaacctgatctagcatgactttcttcatgagtactacatacattatgtggccacgctactggcagttttcaatgcaaacaaatgcatttgaa

SEQ ID NO: 94978 - DNA, 600 bp, Chicken  19866894565023_1
ctagctctccaaactttcagggctttggcgcctgaggtttatttactgaaacttggtaggattcatcacatgcctagaagaactcatgaaattactccggaggattaaaaattcatagaatgatggaatttcaagcacttgaggaaatcgttgacgtggccctctaacggcaagaaccctacttggactcaaactttgcagcgcagaggaggcctcatgcatatgtgtcggtatctgatgttgcagcaagaacaccaagaggcatggtcctacttctcttttctctctcccactcccagraatgtactattcctggaaaagatagaaggatcagggaagacatggttcattcctttgatgatgtggtcaggtttaattttgcttatctataatgcgaaagaataaccatagtctgttttgcaagtggattacactaaaccgcaagtatctttgtgcctatggagaatgggtcttgagataatcgctgttgtcttggtattttttttttcctataccttttttctacaacagagaggggctgacagggtatactaatatgttccatcaagctgacattatcttctggacgaggagatatct

SEQ ID NO: 94979 - DNA, 600 bp, Chicken  19866894565025_1
cttctaaatttagaagcaaggctttttaataatatgtttttttcatcgattttttttctttctgtgataatctctatttttgagtgctatttttgttccccaaatcttctccaactgatttataaaagtatatgaattagcattttaatgggaatagatgaatttcaccatttctctgagatgagtatattcccgtttatttagaactcagcaagactcaaagacagaataaattcagtatttttttttctttttctggagcaagtagggagcaagaagacagagcaactctaagattcycatcctatttgacactgtatccacatgcagaatagtttatttttccagcatgaattcccaaactttggctcttgatcatcagttctgcaggaggctgagtactttgaactcccattgacttctttcacagcacaataaagttctcatcctgaggtgcacagcaatgccccatgtattttttaattggagcaattatctcagaatggcttagtatgaagcacgatttcaaaaaaacacaatttcctctaggtaaatggtgtcagtttctaaagttgttggttactgctaatgagtatctga

SEQ ID NO: 94980 - DNA, 600 bp, Chicken  19866894565027_1
cattgcaagctaccatttacgtaaattttaagaaaaattagtctagagactgcttgtgctttcatacacgtgcagcatagctttctgatctgcatgcatgtgcttcagcttgttcctgactgtcagtgagctaaggtttctatataaactgcttcattaaggctatgagaatgtaattatcactagtgtacagaaggaatgtaggttttgctctcatagttgcacgacaagagaaaggaaatagaggtggaagaagcattcctttgttttcagaattactgttttaaatatagggccacrgcacttctaccatcactctaaacactctgcaaagcgtaacagtgacaggcaagtcataaccacaaatgccttaatctatctacaaacagaatcctccatagaacaaatctggtggtttctgtacgtacatgttttttaattttgggggtcagactaaggatatgaaattattccccaagaaaaaccacctgcaggaggtgaggagacagggtgtagccagaatagacttctgattccagccatacagagaagaaaactaggcattaactctgaaactgtctaataacagttattaacttt

SEQ ID NO: 94981 - DNA, 600 bp, Chicken  19866894565033_1
tcagctaccagctgtgcaaaggcctgccttttattcatttaaaatttacctgctggcagcagcatctataatcaagtgccagaagaatggaaagagagtgtaatgcgtcttggttgttacccagagttgctatggagacaagatgagtctgaagaagagtatcagaggggagtcctgctaaaaaccaacatcgtgtccatgaggaaggaaaggtgcctagaggagtgctgaaacctcaggacaataaaggtgggaatatcccagtaagtgagaggagcaggtaagtaataaagagacttrtgagaatcctgaaagggatcttcacacttttagtgctggtgtcacctcaccttgaatactgtgtgcagttcaatataaaaaggatgctaagatatttgaaaatgtccaaaggacagcaacaaacctggtaaaagggctggaaggcatgtcttatgagaagaagctgaggaaacatggatagtcctggctggggaaaagaaggctgagaggtgacctcattgctctctgcaaattgctggggagaggaagcagagggaggtaacagtttctttcagtaactgatgtcagaattcacgggaa

SEQ ID NO: 94982 - DNA, 600 bp, Chicken  19866894565052_1
gaggtggctgtctctggggctgcaggtgtaaatcttaatggtgtcatttacctgctgggcggggaggaaaatgacttggacttcttcaccaagccttctcggcttattcagtgctacgataccaacacagagaaatgccacgtgaagccatatgtactgccttttgcagggcgcatgcatgctgctgtacacaaggatgtggtgttcattgtagctgagggggattcgctgctttgctataatcccttgctggatagcttcacccggctgtgcctgccagacgcctggagctcagtaccrtccctctggaagattgccagctgcaatggcagcatctacgtttttcgagaccgctataaaaagggcgacgcaaatacttttaaactcaacccagccacctctgttgtaacagtcacaagtggcatcaaagtgctgctcactaacctgcagtttgtcctggcctaatgggtaagagcaggcccagtaataggacaggcggcgatggtgttctgctgtgcagctcagaggtacccgccaccctcagcaccggtcccagttactacaagctcacaacatccagtaaagagcccatctgcacag

SEQ ID NO: 94983 - DNA, 472 bp, Chicken  19866894565058_1
acctgttttcttcctgtggctttttttcctgagtgaggaagtatttataaagctgcctctttagatttgcttgtccatactttagtgacaagagatactcagtgacattagggcagactatcattaggttattagtgccttggttctcttatagagctgaaaatacctgtcaaattcaatggaggtgtattgcttctcaaaagtgtagtgtgctaagactttaaaactgttagcaactaaaaacaattcctttactgcagcaaacgtgattggaagaatacttacatgatacaagcagcrtaggaaaattcctttttgaagcccttccttcaaaagctcttttctgcatgttctatgtgccttggaataagtaagtaattctaatgaaatgctaggctgccagtttgcatgcttttacctccactctttgctgtatccctttgtttgaggccatccaacaaatctggctttt

SEQ ID NO: 94984 - DNA, 599 bp, Chicken  19866894565072_1
  misc_feature (1)..(143): n is any nucleotide
nnnnnnnnnnnnnnnnnnnnnnnnnnnnnnnnnnnnnnnnnnnnnnnnnnnnnnnnnnnnnnnnnnnnnnnnnnnnnnnnnnnnnnnnnnnnnnnnnnnnnnnnnnnnnnnnnnnnnnnnnnnnnnnnnnnnnnnnnnnnnnncttggaggtgtagaagtaggataaaaaagtgctgcttcacatgcaccgagccctttctcttgctgggtgaagcaccatgagatgtgcacctggtggcacagggatggtgcaggcagccctcgcggggatggcggccatcctggcgttgtgcagcagyacactgagcagtcaggcactgctctcccgctccggctgagacctccacggctgctccgctccccgagcatcccacagagccttccttgaggaggccgtgtactaccagagtcagctgaggacgttcgggctcacagctccgcttctgaaagaagcagtggaaggaagcattgttttactgagagraattgctttcacatccctgccccaacaggcatgcacgcatcctgcccttgggctgatgagctccagatctgagtgctctggctcaatgaagaccccggtctcttggccccacgc

SEQ ID NO: 94985 - DNA, 600 bp, Chicken  19866894565072_2
gcaccgagccctttctcttgctgggtgaagcaccatgagatgtgcacctggtggcacagggatggtgcaggcagccctcgcggggatggcggccatcctggcgttgtgcagcagyacactgagcagtcaggcactgctctcccgctccggctgagacctccacggctgctccgctccccgagcatcccacagagccttccttgaggaggccgtgtactaccagagtcagctgaggacgttcgggctcacagctccgcttctgaaagaagcagtggaaggaagcattgttttactgagagraattgctttcacatccctgccccaacaggcatgcacgcatcctgcccttgggctgatgagctccagatctgagtgctctggctcaatgaagaccccggtctcttggccccacgcccctcgcacggccctgtgctgaccccaaccttcccacggggccacgcatccccagagcaaacgcagcactgctcatggggagcagctgcagcttccccatctggatcctctttgcagctctctccccagtacgttgccgaccatgaggaggctgagcagaagcatcctggccctttctctttgctc

SEQ ID NO: 94986 - DNA, 599 bp, Chicken  19866894565080_1
  misc_feature (1)..(162): n is any nucleotide
nnnnnnnnnnnnnnnnnnnnnnnnnnnnnnnnnnnnnnnnnnnnnnnnnnnnnnnnnnnnnnnnnnnnnnnnnnnnnnnnnnnnnnnnnnnnnnnnnnnnnnnnnnnnnnnnnnnnnnnnnnnnnnnnnnnnnnnnnnnnnnnnnnnnnnnnnnnnnnnnnngatgctggtatattgtaatcaatgccagctctcctgtgtgtatgcccaaatggtaagtatactgatgaatgttgaagttgcagaggtgtctctgagaaccttaaaaaacttacggtttgacttgactgagcctactgygttgtgctgtgttttgtgatcaaggtctctaatttcatttattgtagcatttaaaaacttagctgaaggtacagaagaagcaaggtgtttaaaatgtcaactgaaagtagtgaatttaacaggtacctgctaattttgactttttaaacatctagttaaagaacagtgatgttgcctgattgctggccgtgaagaaaacagtcttgggtgtatccctggctctacttaacactgcttgtgttgacttcatgctcaacagggagcctcccttcttgctgttctgttcttgttgtttttct

SEQ ID NO: 94987 - DNA, 600 bp, Chicken  19866894565080_2
gccgtgaagaaaacagtcttgggtgtatccctggctctacttaacactgcttgtgttgacttcatgctcaacagggagcctcccttcttgctgttctgttcttgttgtttttcttatgaaaattatggatgtaagatgggaaagtctccagcatggagaagcttggctttgtaaacagtgttccccttcacaaattttcctgagcttcgttcatatttttatctcttctaacattcactcataaaaccacttttccgcataggttgcagtaactctcctgaagaaacaggaattgtgttmtgtagcttcaaatttactttcattctacggctaatatcttgggttctgtgcactgtgttaaagtcttctgtaaaactggaaaaactttctaacaagatgtctgtgcatattctgcccccagcataacaactcatttgctttacttgcttgtagtattttatatgatactggaattgaagcaaagaacgttgttggaatgggttccagttgcactttgctgtcctgcatgccctcagagtcacgggcatagtttaaaacataattaaatgcacagcagttctattttctgagagtgctatg

SEQ ID NO: 94988 - DNA, 600 bp, Chicken  19866894565081_1
taacttccttccatagtatgatttaaattacaagaaagagctgggtatctgagaggatgagttcttacagaacttcctgcaagtcagttatttatagacatttcctttaatattgtttgcttcaccatgtttgcggccaaggaatcatctctgtattaatctgcatgccctctgaagacacacagttcccagtaacatcgatgatgatttgatattctcatcaaggagagattagactcaccaacagaaaatgctgtttaacaatattatagttacagcacatcttccttcagagctttstgtaatcgcaccaagtaagcaaacgaaaatttaagattttatgagcaatcttggctaagtaaaaagcaaaaatcgcctttcagttaccccataatgactaaaggttggagaaaccctatgattttattgacatgaaattctccatgcatgaagttcagtttgagcaccagagccaaactgactactgcccagattcactgctaggtaggaagcccatgccttccagtggcctgaggcacacctcctgctgcacaccacaaacccacagtttaagaggttctgcttttaccacttcagatg

SEQ ID NO: 94989 - DNA, 599 bp, Chicken  19866894565089_1
  misc_feature (1)..(3): n is any nucleotide
nnntgggatgtgagctcaaactcccttatgctctgctcatctcctacaaactgtgatcagggcaaaaattatagcatgaaaggagaaatcctgaattaacaataggatatgtaatcctcatctccttataatgtgcagcttgtcatagccttattgtctaatgaaacatagcagtactgcagctctctatcaaactgaataagcagaacttattatgaatacttaaacactcacggataactaggaagatgcttttcctggtgttcatgctgtttcagagtatcaaggacactaagatawtggagagatgcaaaggaggggataagagattagtaaggacttagattttcctaaaatcctagtttctctcctgcttctgagcacacagttacactgctgaaacaagctatatgtatgtctatatataaatgctagtggtagcatacataatgaatttctcttcgggtgttagaatgcttcagaatttcctctgcaatcatctgcaataatgcctatttggatcacctctaccacctctatccaatacaagacatattatcctacaccgcaaaaaaatggcagccctctaccctgcaaaa

SEQ ID NO: 94990 - DNA, 600 bp, Chicken  19866894565094_1
tagcagagcctgctgataagcacgtgtggacgggtttacatgagcttgtggtccacagcaaattacagactatacttacatttttggtctgttgcctaaagggcagcaattatttagctgaactggtgtttgaactgctaggggcctgtaattgcagcagttcaggcttctctgtttaaagaaaatatgaaaccaaatcacaaattcatctgttaattttcatggtgttggaagggcttaggctgttcaccttgagatctcagatacctgctccactattgaacattcccagtccaggakttgtggccagagtttagatacaactatttggaggatgaagtactttgttaatctcrtaaaaatgcattggaaacactcagtttttcaactacaacagagcagagtcctggtgagctttgaagaaccaagcataagtctacaagcagagtttggggaggcatggaaagctcttgaatgggattttagagttgttcaattttcttggcttttctgcattatgttgctgcaggtggtctttctggccatcaagaataaggtgagagatgggggattttctttccagaatgactgtagcctaga

SEQ ID NO: 94991 - DNA, 600 bp, Chicken  19866894565094_2
agcaaattacagactatacttacatttttggtctgttgcctaaagggcagcaattatttagctgaactggtgtttgaactgctaggggcctgtaattgcagcagttcaggcttctctgtttaaagaaaatatgaaaccaaatcacaaattcatctgttaattttcatggtgttggaagggcttaggctgttcaccttgagatctcagatacctgctccactattgaacattcccagtccaggakttgtggccagagtttagatacaactatttggaggatgaagtactttgttaatctcrtaaaaatgcattggaaacactcagtttttcaactacaacagagcagagtcctggtgagctttgaagaaccaagcataagtctacaagcagagtttggggaggcatggaaagctcttgaatgggattttagagttgttcaattttcttggcttttctgcattatgttgctgcaggtggtctttctggccatcaagaataaggtgagagatgggggattttctttccagaatgactgtagcctagacatatgtcctttgtgaagtcacagcctctttgctgcaatttctgtgcagaagccat

SEQ ID NO: 94992 - DNA, 599 bp, Chicken  19866894565095_1
  misc_feature (1)..(74): n is any nucleotide
nnnnnnnnnnnnnnnnnnnnnnnnnnnnnnnnnnnnnnnnnnnnnnnnnnnnnnnnnnnnnnnnnnnnnnnnnnccgcacagaaagcagcgtgcttaaaaagcgtgaagatgaattgattcctcgcttaacaagtgtgaaaggaagaagaatagcagattagccccgggatcccacggttctcccgaagctgttaagcgcggtgcgaagcggtggatggagtttcagctttcccggcgctgcttctcccattctctggcaacaaaagtcacattaagcctcgttttctgatagcttgttytgtcacttctcaaagcgtttcttctttcgtaacttcattaggttaatgtgttcttctgagagtagctctgattttcgtctcatggaggcatgctacggcaaggcttaaacaccattttagaagtgctrtttcatctgaaacacccttagcttttagttctttcatgatcttaaaagacatgaagggcagagacgtgctggcacacccaaggatctctctatctgctcggggtcgcttcgctcatccctttcctggtgctgttcctgactcagcgcagggctctgtgatcttccaggacc

SEQ ID NO: 94993 - DNA, 600 bp, Chicken  19866894565095_2
aacaagtgtgaaaggaagaagaatagcagattagccccgggatcccacggttctcccgaagctgttaagcgcggtgcgaagcggtggatggagtttcagctttcccggcgctgcttctcccattctctggcaacaaaagtcacattaagcctcgttttctgatagcttgttytgtcacttctcaaagcgtttcttctttcgtaacttcattaggttaatgtgttcttctgagagtagctctgattttcgtctcatggaggcatgctacggcaaggcttaaacaccattttagaagtgctrtttcatctgaaacacccttagcttttagttctttcatgatcttaaaagacatgaagggcagagacgtgctggcacacccaaggatctctctatctgctcggggtcgcttcgctcatccctttcctggtgctgttcctgactcagcgcagggctctgtgatcttccaggaccygggtgatgcatcagacttagagcaacctgtgtgtscgggtgttactgcagacaaaacgtcctgaaaggtgtacgttgaaaatctcttcctctcattccgaaaacccagaatactttaggatggttaat

SEQ ID NO: 94994 - DNA, 600 bp, Chicken  19866894565095_3
tgtcacttctcaaagcgtttcttctttcgtaacttcattaggttaatgtgttcttctgagagtagctctgattttcgtctcatggaggcatgctacggcaaggcttaaacaccattttagaagtgctrtttcatctgaaacacccttagcttttagttctttcatgatcttaaaagacatgaagggcagagacgtgctggcacacccaaggatctctctatctgctcggggtcgcttcgctcatccctttcctggtgctgttcctgactcagcgcagggctctgtgatcttccaggaccygggtgatgcatcagacttagagcaacctgtgtgtscgggtgttactgcagacaaaacgtcctgaaaggtgtacgttgaaaatctcttcctctcattccgaaaacccagaatactttaggatggttaataatacatcagaggctccttccgcacctcttcgtggcttctaggaaatgcaggcaacctttcttaccgctctctttgtttttcaagggaagatggaaaaacgtgcccrttaacatcaggggggctgcagrgctgttgttgcagtgaaggtcacggtcggcrttgagtggctgt

SEQ ID NO: 94995 - DNA, 600 bp, Chicken  19866894565095_4
cattaggttaatgtgttcttctgagagtagctctgattttcgtctcatggaggcatgctacggcaaggcttaaacaccattttagaagtgctrtttcatctgaaacacccttagcttttagttctttcatgatcttaaaagacatgaagggcagagacgtgctggcacacccaaggatctctctatctgctcggggtcgcttcgctcatccctttcctggtgctgttcctgactcagcgcagggctctgtgatcttccaggaccygggtgatgcatcagacttagagcaacctgtgtgtscgggtgttactgcagacaaaacgtcctgaaaggtgtacgttgaaaatctcttcctctcattccgaaaacccagaatactttaggatggttaataatacatcagaggctccttccgcacctcttcgtggcttctaggaaatgcaggcaacctttcttaccgctctctttgtttttcaagggaagatggaaaaacgtgcccrttaacatcaggggggctgcagrgctgttgttgcagtgaaggtcacggtcggcrttgagtggctgtcccagcttcacccagcagccygcgttgggctgatg

SEQ ID NO: 94996 - DNA, 600 bp, Chicken  19866894565095_5
ttcgctcatccctttcctggtgctgttcctgactcagcgcagggctctgtgatcttccaggaccygggtgatgcatcagacttagagcaacctgtgtgtscgggtgttactgcagacaaaacgtcctgaaaggtgtacgttgaaaatctcttcctctcattccgaaaacccagaatactttaggatggttaataatacatcagaggctccttccgcacctcttcgtggcttctaggaaatgcaggcaacctttcttaccgctctctttgtttttcaagggaagatggaaaaacgtgcccrttaacatcaggggggctgcagrgctgttgttgcagtgaaggtcacggtcggcrttgagtggctgtcccagcttcacccagcagccygcgttgggctgatggattctgcccactgctgcagtcttggcaatgatcttgcactgcagactgcttaataattttcattatttttaattcaagttgaagaagtgcaggctcctgctcaaattaaggttggttgtgttgccggaatgtggtaattactttaattgatcacgagatagtttccttgatcaccaattagaccaaattaccgatcaag

SEQ ID NO: 94997 - DNA, 600 bp, Chicken  19866894565095_6
ctgttcctgactcagcgcagggctctgtgatcttccaggaccygggtgatgcatcagacttagagcaacctgtgtgtscgggtgttactgcagacaaaacgtcctgaaaggtgtacgttgaaaatctcttcctctcattccgaaaacccagaatactttaggatggttaataatacatcagaggctccttccgcacctcttcgtggcttctaggaaatgcaggcaacctttcttaccgctctctttgtttttcaagggaagatggaaaaacgtgcccrttaacatcaggggggctgcagrgctgttgttgcagtgaaggtcacggtcggcrttgagtggctgtcccagcttcacccagcagccygcgttgggctgatggattctgcccactgctgcagtcttggcaatgatcttgcactgcagactgcttaataattttcattatttttaattcaagttgaagaagtgcaggctcctgctcaaattaaggttggttgtgttgccggaatgtggtaattactttaattgatcacgagatagtttccttgatcaccaattagaccaaattaccgatcaagtttcaagacgtgaagaaatgtc

SEQ ID NO: 94998 - DNA, 600 bp, Chicken  19866894565095_7
cttccaggaccygggtgatgcatcagacttagagcaacctgtgtgtscgggtgttactgcagacaaaacgtcctgaaaggtgtacgttgaaaatctcttcctctcattccgaaaacccagaatactttaggatggttaataatacatcagaggctccttccgcacctcttcgtggcttctaggaaatgcaggcaacctttcttaccgctctctttgtttttcaagggaagatggaaaaacgtgcccrttaacatcaggggggctgcagrgctgttgttgcagtgaaggtcacggtcggcrttgagtggctgtcccagcttcacccagcagccygcgttgggctgatggattctgcccactgctgcagtcttggcaatgatcttgcactgcagactgcttaataattttcattatttttaattcaagttgaagaagtgcaggctcctgctcaaattaaggttggttgtgttgccggaatgtggtaattactttaattgatcacgagatagtttccttgatcaccaattagaccaaattaccgatcaagtttcaagacgtgaagaaatgtccgaactgattttgtgtaatagtgttttcata

SEQ ID NO: 94999 - DNA, 600 bp, Chicken  19866894565095_8
gcaacctgtgtgtscgggtgttactgcagacaaaacgtcctgaaaggtgtacgttgaaaatctcttcctctcattccgaaaacccagaatactttaggatggttaataatacatcagaggctccttccgcacctcttcgtggcttctaggaaatgcaggcaacctttcttaccgctctctttgtttttcaagggaagatggaaaaacgtgcccrttaacatcaggggggctgcagrgctgttgttgcagtgaaggtcacggtcggcrttgagtggctgtcccagcttcacccagcagccygcgttgggctgatggattctgcccactgctgcagtcttggcaatgatcttgcactgcagactgcttaataattttcattatttttaattcaagttgaagaagtgcaggctcctgctcaaattaaggttggttgtgttgccggaatgtggtaattactttaattgatcacgagatagtttccttgatcaccaattagaccaaattaccgatcaagtttcaagacgtgaagaaatgtccgaactgattttgtgtaatagtgttttcatatctaatcaagcctaaatatcttttccttgcaga

SEQ ID NO: 95000 - DNA, 600 bp, Chicken  19866894565097_1
aattaaatgtaacaccttcaaccagtgcttgaccaatacatcccctacttcacagaggatgtctgaggatatttagtaccaattccccacagcacacaaaaaccaacccaagtataggatttttttatacatcctctaagaatctgagatctctatctctgtcctgcttgcagtcttactgtctgcaagtactactggtttaaatgcaatgcatggaagtgctgcagctcttttgtcccaaggttaggtgcattacagagcagggtctaagccagcgctttccaagctctgatgggctartggaagaaatgaatttcaaaactctgaacttccattctcttgtttatattcaatactgacattaaggctgctttaaagttccacgctgtaaaataacacttcaactaaataggcttttgaggaaaatgagtatttacattccacagcttctgcagctaacccaatgaagtgcttaagcttcatgtttaggtaaagtactatagttctaaaaaatgaagaattaaagtttcttcgtgaggtttccctggaaactcaaagcctgtagtgtcaccatttttaactggaaagggaaacagatga

SEQ ID NO: 95001 - DNA, 600 bp, Chicken  19866894565097_2
aagaattaaagtttcttcgtgaggtttccctggaaactcaaagcctgtagtgtcaccatttttaactggaaagggaaacagatgaatctgcactgacaaactggtacttccttggttaacaaacaggaaacgctttgtattgtttgaaatttcacctgaatttgcacagtaacaagttatgcactagtgcaataatttagtcaaggattagttacactcacagtaaatcaatcaaattaaatgaaggaagttctggtcagagcttgtctgaaaagaacatctggcagtctttttattcaraacactagagatatattcatggcagaaagaatcacaatgtaactaggtaacttgaaatcacagcaacacacacaacacatgcaacacatcacgtatgtaccttatgcaatgaactgctttccactagaagacagggcaaggttttaaaaagagagattaagtctttatttccaacacatatttctcttttcctcttactaactcatttaacatacagtatttctcccattgctgactacccttttaccatagctccttgtagtttagcaaactcttctcagtgagttacatggaatgctg

SEQ ID NO: 95002 - DNA, 600 bp, Chicken  19866894565099_1
aaagaggtattcaactgtgattcttataataaagacattctgtctcatttccaccaacagtcaacataaatatgagagcttgtatcaaattaaacatgactaagttttcatacttggcaactacaactggattccataaattattaggttttagttatagtctagatatgtcaaggatagcaactgttctggcgaaggtcctgaaatcaaccagtccttcagcaaatatggtgctgagggcacatttttgtaaaaggatacaatcaggcacttctgcaatgagcacgctgtacgcggctrcacaatttgatgcrtgtaatatctcattaattcacatctctaactagttcttaaaaagtaaaatagttcttatacttgactgtgaaatggttgattgaactggttttcacagaataagcacaatgatgatccttaatctttacattatttcaagggtcacaggacattcagaagctaatgaagaatcatcactcagcccccttttccctgccaaagtaacaaagaattaaatgtagctgtgagaaaacgaaaatgggaatgtaattacgtaagtataatttctcattattttaagttaaa

SEQ ID NO: 95003 - DNA, 600 bp, Chicken  19866894565099_2
ctgtgattcttataataaagacattctgtctcatttccaccaacagtcaacataaatatgagagcttgtatcaaattaaacatgactaagttttcatacttggcaactacaactggattccataaattattaggttttagttatagtctagatatgtcaaggatagcaactgttctggcgaaggtcctgaaatcaaccagtccttcagcaaatatggtgctgagggcacatttttgtaaaaggatacaatcaggcacttctgcaatgagcacgctgtacgcggctrcacaatttgatgcrtgtaatatctcattaattcacatctctaactagttcttaaaaagtaaaatagttcttatacttgactgtgaaatggttgattgaactggttttcacagaataagcacaatgatgatccttaatctttacattatttcaagggtcacaggacattcagaagctaatgaagaatcatcactcagcccccttttccctgccaaagtaacaaagaattaaatgtagctgtgagaaaacgaaaatgggaatgtaattacgtaagtataatttctcattattttaagttaaaggacatgggaagtg

SEQ ID NO: 95004 - DNA, 600 bp, Chicken  19866894565104_1
agacaaatcctccatacactcataatcctggaaagagatgtaacaggcaacaattctttctacagttgctttctttttttccttccacttctgggttatctctgaatttttttctctgaatttgtgattggttttcttttcttctctattggatcatgtttgacagctgagttgttgcagtgcttaagaatgttcatatcagcgctgagcacttaaaaatctttccaaaactctgatacaaatgcaacagaattggaattcacatttaacttctattttaagaccattgtatagaaaagsaccctatgcaagcctattcataagagacatrtttctgcactgtgcttagatccatcaccagcggctgtttaaaacctcagctctttctatacaggcrtttgtgcaaggcaacctgtgacctaacgtgtagtcaccctgttttctaatggagtagcaggtggtgactcagagcttccttatgacttattcataawtcccaatgttcacttgtgccagcatattaaatgcattaccaaagagggctctttcctattttgaagcgggcagatgttattgacctcatttgggctgttgccttat

SEQ ID NO: 95005 - DNA, 600 bp, Chicken  19866894565104_2
aaagagatgtaacaggcaacaattctttctacagttgctttctttttttccttccacttctgggttatctctgaatttttttctctgaatttgtgattggttttcttttcttctctattggatcatgtttgacagctgagttgttgcagtgcttaagaatgttcatatcagcgctgagcacttaaaaatctttccaaaactctgatacaaatgcaacagaattggaattcacatttaacttctattttaagaccattgtatagaaaagsaccctatgcaagcctattcataagagacatrtttctgcactgtgcttagatccatcaccagcggctgtttaaaacctcagctctttctatacaggcrtttgtgcaaggcaacctgtgacctaacgtgtagtcaccctgttttctaatggagtagcaggtggtgactcagagcttccttatgacttattcataawtcccaatgttcacttgtgccagcatattaaatgcattaccaaagagggctctttcctattttgaagcgggcagatgttattgacctcatttgggctgttgccttatctagtgcatacaagcaaatgcatctatcttt

SEQ ID NO: 95006 - DNA, 600 bp, Chicken  19866894565104_3
atctctgaatttttttctctgaatttgtgattggttttcttttcttctctattggatcatgtttgacagctgagttgttgcagtgcttaagaatgttcatatcagcgctgagcacttaaaaatctttccaaaactctgatacaaatgcaacagaattggaattcacatttaacttctattttaagaccattgtatagaaaagsaccctatgcaagcctattcataagagacatrtttctgcactgtgcttagatccatcaccagcggctgtttaaaacctcagctctttctatacaggcrtttgtgcaaggcaacctgtgacctaacgtgtagtcaccctgttttctaatggagtagcaggtggtgactcagagcttccttatgacttattcataawtcccaatgttcacttgtgccagcatattaaatgcattaccaaagagggctctttcctattttgaagcgggcagatgttattgacctcatttgggctgttgccttatctagtgcatacaagcaaatgcatctatcttttatgcaggctaagctgcagtttggtgctgagaaaatccagacacttaaaggtaaatagcacagatc

SEQ ID NO: 95007 - DNA, 600 bp, Chicken  19866894565104_4
catatcagcgctgagcacttaaaaatctttccaaaactctgatacaaatgcaacagaattggaattcacatttaacttctattttaagaccattgtatagaaaagsaccctatgcaagcctattcataagagacatrtttctgcactgtgcttagatccatcaccagcggctgtttaaaacctcagctctttctatacaggcrtttgtgcaaggcaacctgtgacctaacgtgtagtcaccctgttttctaatggagtagcaggtggtgactcagagcttccttatgacttattcataawtcccaatgttcacttgtgccagcatattaaatgcattaccaaagagggctctttcctattttgaagcgggcagatgttattgacctcatttgggctgttgccttatctagtgcatacaagcaaatgcatctatcttttatgcaggctaagctgcagtttggtgctgagaaaatccagacacttaaaggtaaatagcacagatctgtatggctgtgcatagcatacagaaaaaaataaaactggatgaattgaagaatatgggtaactactaatgtatacagatacataatcatcgctttg

SEQ ID NO: 95008 - DNA, 600 bp, Chicken  19866894565104_5
gaagcgggcagatgttattgacctcatttgggctgttgccttatctagtgcatacaagcaaatgcatctatcttttatgcaggctaagctgcagtttggtgctgagaaaatccagacacttaaaggtaaatagcacagatctgtatggctgtgcatagcatacagaaaaaaataaaactggatgaattgaagaatatgggtaactactaatgtatacagatacataatcatcgctttgagtgtttaaaatcaacatgtatttttgccccattctattttgaccacttagtggcataaatmtacttctgtagatcaatactttgtgttaaatatctttatttgcaaattaagtacacatttaataagaggcaggttattggactaattttctccagttatctcaattactgtctaagcataaactattcctcttttcccttttggcacgtgcaaagtttctcctgcatttatagggcagaatatatagggcatatattgtaatgagaagagcgatcggaactgcatcttgaaagtgctgggagccttccgaggttatgaagcttggctctgccctgcctgtaagacccaatcccatgtgcc

SEQ ID NO: 95009 - DNA, 600 bp, Chicken  19866894565111_1
gtaattaaaaggttaacttatatactgttgcagtcaattcaaaacattccaatggcatattttgtgtgctgggtttacttattgttttgcttctgcaaatgtatttcctatatgaaaatacggcagttctactggatatgcaattttttggtgatccttcatagcagaaggaaaagtatattgcatactgccccagtggattaaataaagaaaatttattagctatttgtaagtgtcctttttgaaatttatcatgcaaaaggtttacttgagacctttgcagttgtaatgtggagctgkgatgtattgaaactacaacactgtggcaaatcagttgttgaaacaaggtgtcttgatctgagyatataatgtcttctctatttttttctaagttatattttaatcaggggaagaatcacctaagattagatgttctttctgtagtctggcacaaagcatgtttatacaaaccgtgaatcatgtatagcaaatagtgtgaggataaaaaaaacttaggcttgctaatgttggagatagagagcttcagggacaaacggggagtcatgatgctgaaggcaaagatttcrtgtccagtcttac

SEQ ID NO: 95010 - DNA, 600 bp, Chicken  19866894565111_2
gtgtgctgggtttacttattgttttgcttctgcaaatgtatttcctatatgaaaatacggcagttctactggatatgcaattttttggtgatccttcatagcagaaggaaaagtatattgcatactgccccagtggattaaataaagaaaatttattagctatttgtaagtgtcctttttgaaatttatcatgcaaaaggtttacttgagacctttgcagttgtaatgtggagctgkgatgtattgaaactacaacactgtggcaaatcagttgttgaaacaaggtgtcttgatctgagyatataatgtcttctctatttttttctaagttatattttaatcaggggaagaatcacctaagattagatgttctttctgtagtctggcacaaagcatgtttatacaaaccgtgaatcatgtatagcaaatagtgtgaggataaaaaaaacttaggcttgctaatgttggagatagagagcttcagggacaaacggggagtcatgatgctgaaggcaaagatttcrtgtccagtcttacttacaataaaattgttaaagtaactaaagtaatctaaagtaactttatcctggtatatattaa

SEQ ID NO: 95011 - DNA, 600 bp, Chicken  19866894565111_3
aatgtggagctgkgatgtattgaaactacaacactgtggcaaatcagttgttgaaacaaggtgtcttgatctgagyatataatgtcttctctatttttttctaagttatattttaatcaggggaagaatcacctaagattagatgttctttctgtagtctggcacaaagcatgtttatacaaaccgtgaatcatgtatagcaaatagtgtgaggataaaaaaaacttaggcttgctaatgttggagatagagagcttcagggacaaacggggagtcatgatgctgaaggcaaagatttcrtgtccagtcttacttacaataaaattgttaaagtaactaaagtaatctaaagtaactttatcctggtatatattaaatgagttggcttggagcagaagtggctaatcagagcataaagaaattgatttctaaaggtgaaatattccatttcctttcctctgcctgcgtgtcatttttttccctgcaggttgaactcaagtacaggagtcgttttcattttcagatgtttcatatacctgctacaatgagaaaatccataggaaggaaaagatagtatagaaacttcgcaaaccagtcagc

SEQ ID NO: 95012 - DNA, 600 bp, Chicken  19866894565112_1
ttttcttaaacaaccaagaaatcaactgtacttcgggaagtcctttcagctttacccctgcaggagaagtttcagatagtacatgtcaaatgtactgacttctttaatagctgactatagttgcagtacctcagctttgtacttgtaatgctagttgatctaggttgtccttcaattccttcctagcaattcctctgaaagtacaactttacgtttgttggatgctgtgatagctgcatgaagaggatgttgagtagcatgtgtattccagacttaataagaatcttcgttcaagtcctrcataaatgtcagaatcaatatgaactcctttaaagctaagacagtgggcatgtgagtatttttagctatatctgaaagaaactggaaagataattaaatagctgatgtagtttaattttaagagtaaaaactttctctgtataccgtgctaatgcgttcaccaaaacctcttcctgcccagcctctcacaaaaacaaagtactccttcccaaacctttcttaccctataattgcactctgtgatctcattaactgagtgaggctgatgccctgtgggacaatcttgtgtaatcatgtaat

SEQ ID NO: 95013 - DNA, 600 bp, Chicken  19866894565112_2
agataattaaatagctgatgtagtttaattttaagagtaaaaactttctctgtataccgtgctaatgcgttcaccaaaacctcttcctgcccagcctctcacaaaaacaaagtactccttcccaaacctttcttaccctataattgcactctgtgatctcattaactgagtgaggctgatgccctgtgggacaatcttgtgtaatcatgtaattaaaaatgcataataaaccacataaacaagggaacagaattaaggctgctctgaaatgtctaacccaattcctcccttaccaccctrcctgtctttgacattttcacaaatagggttgcaggtgtttgttttttttctttcccaagctttatcatatatcaataaagcgtaaaccttctgtaatttaccatggttccctaacatggtataggcatcaaatatgttatcaggcagcatgaggaaagtgataattgtcttatgctgtagcaaagatatgtgaaggatgtaggcgtagtttgcaaaggcagctccattctataagatggagtaaatatttaatagatcttttgagagataatgatttaatctgagattcagttatgtaat

SEQ ID NO: 95014 - DNA, 545 bp, Chicken  19866894565112_3
tgatttaatctgagattcagttatgtaatgttagaatgtttgactctcaccagatcccataaactctgtagtcctgtttagcaaggaagtgttaggaaattgttgctggttatggctggaatgtaagtgaacagagaacttcattttaagcaaatagtctttttcaaatatgggcaaggtataatgtctgggaccttaaccaagggcataaccacctttgtggtgtattttggacaacatttaaaatattttttactttgtccctggctgagaatgttatgtgtttgtgtggcagagcaraagaaaagcagcgcaagaggcctctgctaaatctcagaggaacattacaaccaatgaataacttttttttttttataatggaaactactaggaaggatttagatgtatataatacaccctcataaatggagagggacatccagtcacctaatttctcacactagcacaattcctggggggtacagtgcagtatatcccagtttgtatactggaacagctcattttgacctattgtgttactcagt

SEQ ID NO: 95015 - DNA, 472 bp, Chicken  19866894565114_1
aaagtggaggcttaaccttacatggaagcctctgaagttccatgcatctgctttatctctgtaaacattctccagtctttccccatcttattctttacagacaaactcctgggacattatcgttgtacatctgttctctgaattttatattccattacacttttccttcttttaactttgtgggttttttcccatgatgtggctgtggatgaaaaggatgaagtaactgtgcttgggtttgtactgctcttttcttgagtctaacacactctcctttttaaaaatgaatgaaaaacaatwtattttaggatgtgtcctatgttcacatttttttatcacactacagtatttacattgttaaaattctttaaggttttcctatcacaaatcagagtaacacaggtattaaactgtcctacctggtagtgccttatttaaataccaagttgtaagaaaaatacttagaaatgat

SEQ ID NO: 95016 - DNA, 600 bp, Chicken  19866894565119_1
ccacaatttctccacaagatgagagcatatcacctttgcccctcttcattgagccttattctgctataggtgtttattggtcagtcacagttacttatcttaataaattacaacttttgtattcatataaagcaacatttagtaatatttactaaacacaaatgagttcaagttccggattttttataaaccggagaagggttaaatctacaaatttttgtagttttgtttgtttgtttgtttgtttttgttttttcctgaaaaatagaaattaaaccacttgaactctaaaagcaaaawatgtaaatgtcaagtgttgatgaaactagttcagatatacaactttaagaaaatgtgctagcaagaaataataccttcaggaaacttactgtattttaacatgtatataagatagtcttaaaaaataataaaacagaccaggtacacagtttaaagttcaagtatatctgatttttgcataaaagagcaacatttactgtgctcgtaaaagtaattcagaatattatttttattgggatatttcatgtcttcatttcacatttggtgtacttaatgatacctgaaaatttgaatacaagt

SEQ ID NO: 95017 - DNA, 600 bp, Chicken  19866894565124_1
gaaagatgatcctggtagctacaggcctatcagtctcacctcagtgtctgggaaggttatggaacaaataatcttgggaaccatcatggaccaattaaaggtcaagcaggggatctggcacagtcagcatgggtttacaaacggtgaatcctttctgacaaacctgatttcattctatgacaaggtaacccgcttagtggatgagggtcaggctgttgatgtggtctacctggacttcagtaaggcctttgacactgtcccccataacattctggtggagaagctggctgcccatggtcyggatgggtgtacgctccgctgggtgaagcackggctggatggccgtgcccaaagagccgtggtcaatggagttgaatccagttggcggctggtcacgagcggtgtcccctgaggctcagtgctggggccgcttctgtttaacatcttcartgatgatcttgatgagggaattgagtgcaccctcagtaagtttgcaaacaacatcaagctgggagggagtattgatctgccagaggggagaagggcactacagagggacatagatagactggatcgatgggccaaggttaacgtcatgag

SEQ ID NO: 95018 - DNA, 600 bp, Chicken  19866894565124_2
gtctcacctcagtgtctgggaaggttatggaacaaataatcttgggaaccatcatggaccaattaaaggtcaagcaggggatctggcacagtcagcatgggtttacaaacggtgaatcctttctgacaaacctgatttcattctatgacaaggtaacccgcttagtggatgagggtcaggctgttgatgtggtctacctggacttcagtaaggcctttgacactgtcccccataacattctggtggagaagctggctgcccatggtcyggatgggtgtacgctccgctgggtgaagcackggctggatggccgtgcccaaagagccgtggtcaatggagttgaatccagttggcggctggtcacgagcggtgtcccctgaggctcagtgctggggccgcttctgtttaacatcttcartgatgatcttgatgagggaattgagtgcaccctcagtaagtttgcaaacaacatcaagctgggagggagtattgatctgccagaggggagaagggcactacagagggacatagatagactggatcgatgggccaaggttaacgtcatgagtttcaatagggccaagtgtcgggtcctggatt

SEQ ID NO: 95019 - DNA, 513 bp, Chicken  19866894565124_3
ctttctgacaaacctgatttcattctatgacaaggtaacccgcttagtggatgagggtcaggctgttgatgtggtctacctggacttcagtaaggcctttgacactgtcccccataacattctggtggagaagctggctgcccatggtcyggatgggtgtacgctccgctgggtgaagcackggctggatggccgtgcccaaagagccgtggtcaatggagttgaatccagttggcggctggtcacgagcggtgtcccctgaggctcagtgctggggccgcttctgtttaacatcttcartgatgatcttgatgagggaattgagtgcaccctcagtaagtttgcaaacaacatcaagctgggagggagtattgatctgccagaggggagaagggcactacagagggacatagatagactggatcgatgggccaaggttaacgtcatgagtttcaatagggccaagtgtcgggtcctggatttggtcacaacaaccccaggcaaccctacagg

SEQ ID NO: 95020 - DNA, 600 bp, Chicken  19866894565126_1
ttttattacaacatgaatatttttttcagtaagaataaaaaccagaaacccagtatgctgtaaactgaaaacatcatgaacatcacaaatgccacaacaaaaaccagacaaaactttctcacagagcatttcgttaagctgtgaaactcctttctgtaggacactgtagttgcagagggttacatgtatgcaaataagcactggacaaatggaggagtattgcattgaaacatactgccttccatacaatgcttccaagtgcaaaagtctttaagtagtaaaccccttgtggcaaagggrgaatactggrgagtgacaccatggccactcatgtccagcatcttttattcctactgccaatagtgaaygttcactgttgcaattttcaggaatttcttgggtgtatataattagaagttaaattatttgctcttctacagtgatgggatggcatggcctacttagtatgaaacatttctattgttatgaaatgttattttagacagaagagtttctcaacctyattgtatctgaaaatcaatatattcattcactctgagcttgttcatcaaggtcaaaagctagaacaaaaaacatcca

SEQ ID NO: 95021 - DNA, 600 bp, Chicken  19866894565126_2
acatgaatatttttttcagtaagaataaaaaccagaaacccagtatgctgtaaactgaaaacatcatgaacatcacaaatgccacaacaaaaaccagacaaaactttctcacagagcatttcgttaagctgtgaaactcctttctgtaggacactgtagttgcagagggttacatgtatgcaaataagcactggacaaatggaggagtattgcattgaaacatactgccttccatacaatgcttccaagtgcaaaagtctttaagtagtaaaccccttgtggcaaagggrgaatactggrgagtgacaccatggccactcatgtccagcatcttttattcctactgccaatagtgaaygttcactgttgcaattttcaggaatttcttgggtgtatataattagaagttaaattatttgctcttctacagtgatgggatggcatggcctacttagtatgaaacatttctattgttatgaaatgttattttagacagaagagtttctcaacctyattgtatctgaaaatcaatatattcattcactctgagcttgttcatcaaggtcaaaagctagaacaaaaaacatccagtagctgcag

SEQ ID NO: 95022 - DNA, 600 bp, Chicken  19866894565126_3
aaacatcatgaacatcacaaatgccacaacaaaaaccagacaaaactttctcacagagcatttcgttaagctgtgaaactcctttctgtaggacactgtagttgcagagggttacatgtatgcaaataagcactggacaaatggaggagtattgcattgaaacatactgccttccatacaatgcttccaagtgcaaaagtctttaagtagtaaaccccttgtggcaaagggrgaatactggrgagtgacaccatggccactcatgtccagcatcttttattcctactgccaatagtgaaygttcactgttgcaattttcaggaatttcttgggtgtatataattagaagttaaattatttgctcttctacagtgatgggatggcatggcctacttagtatgaaacatttctattgttatgaaatgttattttagacagaagagtttctcaacctyattgtatctgaaaatcaatatattcattcactctgagcttgttcatcaaggtcaaaagctagaacaaaaaacatccagtagctgcagaatagttcctagacaaactacaattgatactctcatactctcacattcttaggcattt

SEQ ID NO: 95023 - DNA, 600 bp, Chicken  19866894565126_4
attgaaacatactgccttccatacaatgcttccaagtgcaaaagtctttaagtagtaaaccccttgtggcaaagggrgaatactggrgagtgacaccatggccactcatgtccagcatcttttattcctactgccaatagtgaaygttcactgttgcaattttcaggaatttcttgggtgtatataattagaagttaaattatttgctcttctacagtgatgggatggcatggcctacttagtatgaaacatttctattgttatgaaatgttattttagacagaagagtttctcaacctyattgtatctgaaaatcaatatattcattcactctgagcttgttcatcaaggtcaaaagctagaacaaaaaacatccagtagctgcagaatagttcctagacaaactacaattgatactctcatactctcacattcttaggcatttcaggctcaaataaggccatgacagtacatgttaactgaagctctaacatttaaattagatttaattcaaacatttaaaattagtaggcactgtgcagaagtcctgaaaacccaacattcttttcctttataaatccacaaagcctttagcacttc

SEQ ID NO: 95024 - DNA, 600 bp, Chicken  19866894565128_1
aaaggtttttgtgtactctctcaccagcttatcagccctttacaaggagtgcaccaggaactcttgtctgtagttgaaatggagctcaggttttgagcaggcatcatgtgcagcatcctggagatgtggtcttgcctctcccggtagcttcctcagcaatgctgcttgtgccaacctttgtgacttcatttaaaatcaagttcacagctatgtgtgtcacttcttgcaccttacagctctaagaagaaaacccctagtgctactccagatataaccctggagttttcgggagcaaactgrtacaggaaaagggtaggaaaacgaggatattctggtgtttccacatttgtttagatgaaattctttttttctcctcacagcaaatagaagaagaattgaatgaacagttatttgataacctagtgagttttttgaggcggtctcattctgcattccaagagaagaaaacagaatggacgtgtcggacgaagtccagagaaatccctactgcggctcttgtcttgggtaacttcttaaagatacattctgttatgtccatctgtactcttamagaggcttgaaattgatacagagatcaaa

SEQ ID NO: 95025 - DNA, 600 bp, Chicken  19866894565128_2
taaccctggagttttcgggagcaaactgrtacaggaaaagggtaggaaaacgaggatattctggtgtttccacatttgtttagatgaaattctttttttctcctcacagcaaatagaagaagaattgaatgaacagttatttgataacctagtgagttttttgaggcggtctcattctgcattccaagagaagaaaacagaatggacgtgtcggacgaagtccagagaaatccctactgcggctcttgtcttgggtaacttcttaaagatacattctgttatgtccatctgtactcttamagaggcttgaaattgatacagagatcaaagagaattgtttcacatatttacagcaatcggtgcaggccaagtcagcttcagaaatgttaacggaagagattgygctgggagtaggaagcagagttgacctgtttccattttgtctgtatgcttagtaccttagtgcaataaatttgctccttccttaggggttcatcttaggcaaccagtagtcatttgggttgtttttcttgatgcagcagagatgctttgattctattcccatatctggcactaatttccttggtggtttctatgact

SEQ ID NO: 95026 - DNA, 600 bp, Chicken  19866894565128_3
tcacagcaaatagaagaagaattgaatgaacagttatttgataacctagtgagttttttgaggcggtctcattctgcattccaagagaagaaaacagaatggacgtgtcggacgaagtccagagaaatccctactgcggctcttgtcttgggtaacttcttaaagatacattctgttatgtccatctgtactcttamagaggcttgaaattgatacagagatcaaagagaattgtttcacatatttacagcaatcggtgcaggccaagtcagcttcagaaatgttaacggaagagattgygctgggagtaggaagcagagttgacctgtttccattttgtctgtatgcttagtaccttagtgcaataaatttgctccttccttaggggttcatcttaggcaaccagtagtcatttgggttgtttttcttgatgcagcagagatgctttgattctattcccatatctggcactaatttccttggtggtttctatgactaatccctatggcatggaattatacagcttctgtatttctgatatatgttaatgggttgactcttgcagagcatcattacatgtaagaaagcagcatctttatc

SEQ ID NO: 95027 - DNA, 600 bp, Chicken  19866894565128_4
agaattgaatgaacagttatttgataacctagtgagttttttgaggcggtctcattctgcattccaagagaagaaaacagaatggacgtgtcggacgaagtccagagaaatccctactgcggctcttgtcttgggtaacttcttaaagatacattctgttatgtccatctgtactcttamagaggcttgaaattgatacagagatcaaagagaattgtttcacatatttacagcaatcggtgcaggccaagtcagcttcagaaatgttaacggaagagattgygctgggagtaggaagcygagttgacctgtttccattttgtctgtatgcttagtaccttagtgcaataaatttgctccttccttaggggttcatcttaggcaaccagtagtcatttgggttgtttttcttgatgcagcagagatgctttgattctattcccatatctggcactaatttccttggtggtttctatgactaatccctatggcatggaattatacagcttctgtatttctgatatatgttaatgggttgactcttgcagagcatcattacatgtaagaaagcagcatctttatcttggaaaaggagcagag

SEQ ID NO: 95028 - DNA, 599 bp, Chicken  19866894565134_1
  misc_feature (1)..(109): n is any nucleotide
nnnnnnnnnnnnnnnnnnnnnnnnnnnnnnnnnnnnnnnnnnnnnnnnnnnnnnnnnnnnnnnnnnnnnnnnnnnnnnnnnnnnnnnnnnnnnnnnnnnnnnnnnnnnnaccgcaagcggtgagcttcctcctgaattattgtaaaagttttcatgtactatgaatacaatggctctaattgccatcacaaagacttaactttccagagctctagcagggttttgagcttcatgagttaactgtaggcccgggtttgaattaaatcagtatgaattagttctaaactgaaaagtcactaytaattgacaggctgagctgggttggcccgagaggatggcaatgaataagcccatattcctttggtacaaatcccactgtcggagagatgacacatcggtgtcagtgcattatagctccagtttgacagaaagagttgcatgtagcccatctccagaaaacacagaattttaactctttgtggacctgccatcatggactcctgcaaaccctcacagcccaccacgagttggtctcagtacagaccgtccttgggctgccaaggtgacaaatggcaatgttgaaacctggagctggcacg

SEQ ID NO: 95029 - DNA, 547 bp, Chicken  19866894565134_2
attgacaggctgagctgggttggcccgagaggatggcaatgaataagcccatattcctttggtacaaatcccactgtcggagagatgacacatcggtgtcagtgcattatagctccagtttgacagaaagagttgcatgtagcccatctccagaaaacacagaattttaactctttgtggacctgccatcatggactcctgcaaaccctcacagcccaccacgagttggtctcagtacagaccgtccttgggctgccaaggtgacaaatggcaatgttgaaacctggagctggcacgacrcatatctctaattactgctggtaggagacatagtcccacgcatactgagaatgtgtccttacagggccatgcctatttatatgcagagaacaaacaattaagtaaagaataagttttgagtttgtgaaaatccctacagtgagattacaagagcacagtgtgctccctaaccagggaattacccagtacagcgactgctcaggagctgctgtgcacctggaggcagccaatgaagcctgctgactca

SEQ ID NO: 95030 - DNA, 440 bp, Chicken  19866894565135_1
  misc_feature (1)..(132): n is any nucleotide
nnnnnnnnnnnnnnnnnnnnnnnnnnnnnnnnnnnnnnnnnnnnnnnnnnnnnnnnnnnnnnnnnnnnnnnnnnnnnnnnnnnnnnnnnnnnnnnnnnnnnnnnnnnnnnnnnnnnnnnnnnnnnnnnnnnntttttttcgatcttatttaatttgtattaccccgtccacctgccccgtggggttagcagcccctgtgctgccttgctgcgcaccagcggccccggagcgctgcctgtggggtgggtgtgcgggtgctggccccttcgccgtggccatttgttgaggagtcctgagctyggtgggctccctttgcctgaagccccagtgaccccagtgcagcgggacrggacaccccactgcttgctgagggcatctggggtgacgccgtcggggtgcgggcagggctctgtgggtgtaatggcggggtgtgggtgtgg

SEQ ID NO: 95031 - DNA, 391 bp, Chicken  19866894565135_2
  misc_feature (1)..(83): n is any nucleotide
nnnnnnnnnnnnnnnnnnnnnnnnnnnnnnnnnnnnnnnnnnnnnnnnnnnnnnnnnnnnnnnnnnnnnnnnnnnnnnnnnnntttttttcgatcttatttaatttgtattaccccgtccacctgccccgtggggttagcagcccctgtgctgccttgctgcgcaccagcggccccggagcgctgcctgtggggtgggtgtgcgggtgctggccccttcgccgtggccatttgttgaggagtcctgagctyggtgggctccctttgcctgaagccccagtgaccccagtgcagcgggacrggacaccccactgcttgctgagggcatctggggtgacgccgtcggggtgcgggcagggctctgtgggtgtaatggcggggtgtgggtgtgg

SEQ ID NO: 95032 - DNA, 600 bp, Chicken  19866894565140_1
agctacaatctaaagtatcactaataccttattaaaccctagactttaatttcttttctcttttataagagaagtgaatcatttgctctcattaaggcagtgtcaaaggatcaaaccaaaatacattaacaattatctgccaacaaaaagaaaatcagcaatgacacatgggagcagggatgacacgtggatgcacaagtacagtaacacagacatgcatcagcacatcagagtgcatcagtacatgcatactgggctttgtgttgatgcttttaatgtcctccagctttggtatcgtcrttttttttttctcctagcttccagcaatatgctctttagaagctacttttaaagagttagagaacatttgcttcttaattagttttcatttctttctgggaacatctcacattattttctcttatgggtagcrctaccctgttgccttcacgtagctgtaatctcatccttattcctgcaaagaaacaggtccatatagaagacagccagaaccttcctgaacacacctgctatcatccatgatttcagtgcagctatcaaactgtgatgtccactcaaattaattaataatgaggacaa

SEQ ID NO: 95033 - DNA, 600 bp, Chicken  19866894565140_2
tatctgccaacaaaaagaaaatcagcaatgacacatgggagcagggatgacacgtggatgcacaagtacagtaacacagacatgcatcagcacatcagagtgcatcagtacatgcatactgggctttgtgttgatgcttttaatgtcctccagctttggtatcgtctttttttttttctcctagcttccagcaatatgctctttagaagctacttttaaagagttagagaacatttgcttcttaattagttttcatttctttctgggaacatctcacattattttctcttatgggtagcrctaccctgttgccttcacgtagctgtaatctcatccttattcctgcaaagaaacaggtccatatagaagacagccagaaccttcctgaacacacctgctatcatccatgatttcagtgcagctatcaaactgtgatgtccactcaaattaattaataatgaggacaaaaattttcaaatcagtactgatgagaggtgaaattacctatacccagttttggtttactttcagaacacctcagagttgagttgtgtgtagcgtaatgcttaaacatgactcaattttacaccttagttgtgc

SEQ ID NO: 95034 - DNA, 600 bp, Chicken  19866894565144_1
cccagactcgcaggcgaggatttagctgtactaatacaggagcacaacttctattcttttttttctcctttctttttttgttgaccaatcaactccacaacaggctagattgtgcctcaagggcatcgctttcagccacgtgatctccagattaacagagaggctgcaaaatcctttccgctcaaactgtttcaacagaggatcaaaatcttcctctctgcatggggatttttatttagctagttctttttattcagtttgcacatgttgcaaaagaattaaggcctgcaagggcatgtrgaatggtctgttttggtttttaaccttttcaacctgtgtttggaaatagaaagttktccagttctttgtgggaatgtttcctctttcccgggacctatggttgcatccttatttgttgaatttattaagcacactgatgatggccctcaaaggttaaagatgaagaatgttttgcaaaactccccctttcctctgcttcagttcattttctcgttaagggaggaggatatattgaaacaarcaatgatggaatctgaaggggaagggcctgggaaaggcatgagctgggtgcgccctaag

SEQ ID NO: 95035 - DNA, 600 bp, Chicken  19866894565144_2
ttttttttctcctttctttttttgttgaccaatcaactccacaacaggctagattgtgcctcaagggcatcgctttcagccacgtgatctccagattaacagagaggctgcaaaatcctttccgctcaaactgtttcaacagaggatcaaaatcttcctctctgcatggggatttttatttagctagttctttttattcagtttgcacatgttgcaaaagaattaaggcctgcaagggcatgtrgaatggtctgttttggtttttaaccttttcaacctgtgtttggaaatagaaagttktccagttctttgtgggaatgtttcctctttcccgggacctatggttgcatccttatttgttgaatttattaagcacactgatgatggccctcaaaggttaaagatgaagaatgttttgcaaaactccccctttcctctgcttcagttcattttctcgttaagggaggaggatatattgaaacaarcaatgatggaatctgaaggggaagggcctgggaaaggcatgagctgggtgcgccctaaggagttgcatgagatttacagggctctgctgagcaatgaaccacaggattaaatacg

SEQ ID NO: 95036 - DNA, 600 bp, Chicken  19866894565144_3
agttctttttattcagtttgcacatgttgcaaaagaattaaggcctgcaagggcatgtrgaatggtctgttttggtttttaaccttttcaacctgtgtttggaaatagaaagttktccagttctttgtgggaatgtttcctctttcccgggacctatggttgcatccttatttgttgaatttattaagcacactgatgatggccctcaaaggttaaagatgaagaatgttttgcaaaactccccctttcctctgcttcagttcattttctcgttaagggaggaggatatattgaaacaarcaatgatggaatctgaaggggaagggcctgggaaaggcatgagctgggtgcgccctaaggagttgcatgagatttacagggctctgctgagcaatgaaccacaggattaaatacgatcatgtaaataaaataaatgacaattgactgatcgttggccccagcagccaggctactgggaagccaccctttctctggagattcccattgaaactttttatattcaaagcatagatcttctctgagatatgcaggtacagctactgctgacaggaacagggacccaagcacattcagtattgt

SEQ ID NO: 95037 - DNA, 600 bp, Chicken  19866894565144_4
aaacaaaaccaacccactcactcagctgacagatgatgaaccacagcagtgagcttggcggagagcggtttgcataaagccaagaaaatcatagaatcataggatggtttaggttgaaagggaccctcaagaccgtctagttccacctcccctgctatagacagggacagcttccactagaccaggttgctcacagcccctccagcctggccttgaatacctccagaaagggagcgtcaacaacctctctgggcaacctgttccagtgtagcaacagcaatagcaacagcaagagtaaaytcagcaaaaaaatagtagttggcctttgaaagcaatcatggtctagtcatgagcaagtcgtagaattcagaaaatagaggattctccttgcattatgtttggatattcccacagtctcactgtcaaaatcctacagctcgagatttctagattgcaagctggggagcagggtgtgtgctgcacagctggtggcagagggattttgtttcatagcctgtcaatgaaaactccagttctttttcatttaagtccctaaacctttttctgccaccactgggagctatgtgagatgaattttgt

SEQ ID NO: 95038 - DNA, 600 bp, Chicken  19866894565152_1
taactattgctacaactgacaacatgtgtccaagaagagaggtttacaaagtgacacaggccaactccagaatgtgtctgtcttggaagtgatccctgcataccaagactgaagtatcctgcaaaaagatggtccacagtgcattaaaataaacttttaaaaagttagtgaatttgataaagagcatataaagatttgcacaagcccacatacgtagattaaataaagttattttcataaaatatataggagatctttgtaatgggcaaaatccctaaatacttctgtattttgattgcrtatcagcatttcatagatctattcagaaataaagtccaatttttcatctaaactttgggattaaacaccactgattttgtacccacaagcacttttcaagatctgaagattcttctcgcttggaggtgggcaagaatcccttcgccatcaagcaaatgcaacatgatttagttaatatcacgacagacaaagctgctattgaataaacatcacagatctaagctgtaccattttttagctagttagattgcaattgggattacaatttattttgccattgctgaattcctactggttact

SEQ ID NO: 95039 - DNA, 599 bp, Chicken  19866894565155_1
  misc_feature (1)..(15): n is any nucleotide
nnnnnnnnnnnnnnnccggcacaaacagaaggcgcaatttatccagggtggttacagcacggatgctcacactggctggaagctgcttcaagcttggcttatttcatctgattgacattttttccctacacagtcccaggaatgctacctaaccaaatccctgtatggggctgtgtagcaatagcaaccctttgaaacctgatgagaagtgagagttcggtcatttcctgggccataggtgtcgcttgaacctcctcagagccataagctctgaactgaatagtaggcatcagaagtccmatttgtacccacaaccattacaaactcaaggcccatctcctgctcagcactgagaacctttttttccccccagcgagtgattctagtcactgtctgggactcagtaggctacaatgtaggtgctgaagagatctactccaaatgaatacgtagcaggagttaaaaaggtcttacagatgctgtgaagcaagtgaccttccccctctggtaagatttctatgagcataggagattggaatatggaaggagaccgtttaagtaagtcttcacagatgatgcactgggctcactgtggtgtg

SEQ ID NO: 95040 - DNA, 600 bp, Chicken  19866894565156_1
accagatcctgttaggcattttatatactaagtttgagctccacctatacttcccattccctcactaccacaggagggaggggtcctaaataaattatttcctgacaaactccttgtatggggaagtacacagtcactttcttgtaggcttgtacaatctctactgaggcaaagaggtttgaatgtctggagaagaggaggctcaggggaaacgttattgctctctataactacctgaagggagcttgtagtgagctgggggtcgacctcttctcttgtgatagggctagagggaatgasttcaagctgtgccaggggaggttcaggctgggctctaggaaatactacttctctgaaagagtggtcaggcactggagtgggctgcccagggagttggtggagtcaccgaccctggagatgtttaagggacatttggatgttgtgatgagggacatggtttagtgagagctattggtgacgggcaaatggttggactgggttatccttgtgggtcttttctaacttttggtgtttctatgattctatgaatgcactttaatgaaaactggcttgctgatctactctttaaaagcagaatat

SEQ ID NO: 95041 - DNA, 600 bp, Chicken  19866894565157_1
aaagagcatggctcacaggaatgagatcagaacacaggaataaaaggacaaagaaaacaaaaggacacaactatgatcaaaatatttggtaaatgtaaattgctttcgtgttgtgggctgttgcttcaagcagatctggataatcacccagaaaataattttgcttgcataatgacaaagtttattttacttttaaaaaagtcatcagtgttcatgagaggagggaggagtgctggtttgaatcaggcatgttgcaagcagatgttatgcaagcttccccaaacagtcctgccaatgcaytgcaatcctgagttatgacattcactgcatctgcagtttgggtccttttttgggccacagcttcatctgwgggttttcccaaaatggggatgttattcttgtgatgcacatgaaaactttaaggagatcaaaatgctatttttcattttcagaccagaaaggatttggtcaccatatctgaattacatggctgatcagtagcaaggacggaaatgggtaagcacatttatctatcatcacacggttgcagtagtagctcttttaggaaacatgcctctgggttctttcccacaacgcatt

SEQ ID NO: 95042 - DNA, 600 bp, Chicken  19866894565157_2
ctatgatcaaaatatttggtaaatgtaaattgctttcgtgttgtgggctgttgcttcaagcagatctggataatcacccagaaaataattttgcttgcataatgacaaagtttattttacttttaaaaaagtcatcagtgttcatgagaggagggaggagtgctggtttgaatcaggcatgttgcaagcagatgttatgcaagcttccccaaacagtcctgccaatgcaytgcaatcctgagttatgacattcactgcatctgcagtttgggtccttttttgggccacagcttcatctgwgggttttcccaaaatggggatgttattcttgtgatgcacatgaaaactttaaggagatcaaaatgctatttttcattttcagaccagaaaggatttggtcaccatatctgaattacatggctgatcagtagcaaggacggaaatgggtaagcacatttatctatcatcacacggttgcagtagtagctcttttaggaaacatgcctctgggttctttcccacaacgcatttggtaaagtacagcctcctgccatttccttccattccaacaagtcgtttcccaataccattttccaaatc

SEQ ID NO: 95043 - DNA, 600 bp, Chicken  19866894565157_3
tccaaatctgtcatgcatttttcattaaaatactcctttaccctctaagtgtttgaaatggctacatatttccataacctcaaaacaaataaatgaataaatgaagaataaataattgcactgagcagaactgtgctttagaaagactgcaggttcttaaacaggagacgaagtgctgttgctattacagattaaaagctgtaagcagagaatgtcagataatcaaaagatgatcatttctacttctgaagacaccatacttaggagtacctcagaaaaatgaaaacttgtctctgtatkcagagatatttattttcttggaaatctaaatggcccattttcttattatacatcctaatggaactatcgtacgttttacatttttaagtatatactccactgtgtgctttcagactttaatcttgaaaggaagtatgtgggagtacggacgtaaaccagaataacagtttttacatttattgttctctgtttaaacatcattgcaatttccacctttaagcactaagaatactgataaagcctgtatgagcctagcagccccagccatgcmatcagaaactgtatttctttttgtcaaag

SEQ ID NO: 95044 - DNA, 600 bp, Chicken  19866894565157_4
tcagaaaaatgaaaacttgtctctgtatkcagagatatttattttcttggaaatctaaatggcccattttcttattatacatcctaatggaactatcgtacgttttacatttttaagtatatactccactgtgtgctttcagactttaatcttgaaaggaagtatgtgggagtacggacgtaaaccagaataacagtttttacatttattgttctctgtttaaacatcattgcaatttccacctttaagcactaagaatactgataaagcctgtatgagcctagcagccccagccatgcmatcagaaactgtatttctttttgtcaaagcagcagtgccaaacaagtcagactcacaaacagaggctgtgacttcatcacctacagctctgtgctgctattattgacggcagcacctacagctctatgtgtctattgctgaatttgccttatagagttctgggtttgggggcttacgtacatgcgttgtgtctcagttcaatgaaggccagcagctggtggcacaaggaggatttcttgctgcacgtcagtgtttgtgaacagtttgaaaagcgctcaggcatccgacgtagtgtaatag

SEQ ID NO: 95045 - DNA, 600 bp, Chicken  19866894565160_1
ctgctactgttactgtgaaattctttacaagtattaagacaagctaatgccatatatgaaattgccagatgtctgatcagaactctgaagaactcaggcatctacccactcccaggtgaccaatatattaaaagtcttatttcagggcattgtgaggctactaccagcattggatagaagccattggcacacatgaaggccatgagataccactttgtgttatgccacaaaagtccagcagaaaccagaactgctaacaagctgggagagacggaaggacgaaggtctcatcagatgatrgaagaaactcagtcccagtgaaaacataaacatctttccactcccagaagaaagaaagaaaaaaagaaacatgaacactgctgatttgttcataccaggaagagatgtgtcatcattcccggttgtcatttcaaagtacccaatgtctgtttccttggcttatattcaacctcttctatggcttgcatgctataagcagagatagggtattgctgggctataaagtacccactacagattgtatgttacaagaacactttgtaaagcaatagaaaatgcagacaaccattgatttctgaa

SEQ ID NO: 95046 - DNA, 599 bp, Chicken  19866894565162_1
  misc_feature (1)..(43): n is any nucleotide
nnnnnnnnnnnnnnnnnnnnnnnnnnnnnnnnnnnnnnnnnnntgtgcatttctgtcctgcaggaaagtcatgcaatggcccagcccatccagctgcactgagaggaaagaatatagaatcatttgagttggaagggaccattaaaggccatctgatccaactcccctgcactgaacagggacactcacagctccatcagtgctcagagcctcccagcctgaccttgggtgtctgcagggatggggcaccacctcatctctgggcaacctgtgccactgcctcaccaccctcactgtcaraaactttttccttatatccaatctatatctcccctcttttactttgaaaccatttccccccatcctatcacaccagaccctgaaaaagagtctgagttcccaacacaagttcagcggtttgattcatataagcacctggtattgtagctgctgctttacatttttctcagcttaatctgtcacgaggtacttccttatgatttcatatcagtgaatgcttgaagcatttcacagatcacaagtaccacagttacaggtattcaccagcaattggtgaacagagtccacattttaacatt

SEQ ID NO: 95047 - DNA, 520 bp, Chicken  19866894565164_1
atacctgatgtgcctcagaacgtgcctcctgcagggcttaggctgggacacctggtctccccactgatgcccaccactcctgtagcagcctaatctcagcctggggtcataatagctgtccttgcttcttttctcctctcctttcccatgtcactgttcccctgaacatggtgtcctagcactgggcacatcggggcccacaggctctccaaggcggacatcaaggtgttttgtaggctggggtaagcgagcaccatgcctgcttgtggggctaagcaagtggcctgcccagtaacaggrtgtttgctgggactggtacccttgctgggatgttgttttagctatgaggggtcctatgttcaggtgtgctgaggagtgcagctctacacaagacctccaagagatctcattgctgcctcttgagcttactctgtaagtgctcaacttgtcaggtgcacgtgacttcttttctttcgtacctaaaggaaaacttgtagatactgttcagataagatgtcga

SEQ ID NO: 95048 - DNA, 600 bp, Chicken  19866894565172_1
tgaggggtgctgaagggctgccaaagcaaaatcaggaaggagctggggcacgcagcacttctacagaggatcctaatttgatctccatcattaccgttcccaggtgagacgggagaacaggtggaaactgagctgctcagtcagatagtaagtggagggcctgaaacaaaagaagaggaaacaggagaagctgtggatggtgcagcagcgacagagataggtatgttgacagaggagggaaggactgcatgggttattgttcaggagacagaagctgtgctgtccctagggtgcacatcytgtcacccctgtccctgggtacagctgctgctttttgcagtttatgacaacagtcaaatatttttattcacgttaagcaatattgttgctttctgctaagtacgattatgcttttgtcatgggctatcttgatacaatacattctagcccaaggcattctgtgattctgtgataagttatccatgtttgaggagagtgttagactgtaacatgtagtctgtgaaaacagaaaccaaagttaaaatcatgactcgctcattactatttgccacgcttgcttttacgggttaatgccttaac

SEQ ID NO: 95049 - DNA, 600 bp, Chicken  19866894565176_1
ggctgtaaccacactcagaaataaggaggcatttctgagtaattaggataaccaatacaacactgctaccgcttttactgctcagcgctgcccatactgttttcctcctaacatttcctgacccaaacttgcttccttacctaaaattcgtgcctttcttaaacgggctgctacagtgctgttataatgtacacactgtgtctgtatccgtcatgcaggcattatttgctacaccttacagtacgtgacaaagtaaatagaagccgctaatgaacttcagaacatcccgacttaatcatkkcatcagtgctcatagcagacagacaggagactgcgctgggatgaattggtactgcagtgtggaaggaagcgccaggttaagaattctttcatctttccttttttttttaaaatacaaaatctgcatttaaagcactggtgcagcagtgcctgcttatgagcgagcagccttgtaacagcaacaacaacaacaggggcaaatatgtgtgtgaaggaacggagccacagaacccaaaccactgcaaacctggagaaaaatggaactgtcacagctcggggtgcgctcagagcaggacctga

SEQ ID NO: 95050 - DNA, 600 bp, Chicken  19866894565176_2
gctgtaaccacactcagaaataaggaggcatttctgagtaattaggataaccaatacaacactgctaccgcttttactgctcagcgctgcccatactgttttcctcctaacatttcctgacccaaacttgcttccttacctaaaattcgtgcctttcttaaacgggctgctacagtgctgttataatgtacacactgtgtctgtatccgtcatgcaggcattatttgctacaccttacagtacgtgacaaagtaaatagaagccgctaatgaacttcagaacatcccgacttaatcatkkcatcagtgctcatagcagacagacaggagactgcgctgggatgaattggtactgcagtgtggaaggaagcgccaggttaagaattctttcatctttccttttttttttaaaatacaaaatctgcatttaaagcactggtgcagcagtgcctgcttatgagcgagcagccttgtaacagcaacaacaacaacaggggcaaatatgtgtgtgaaggaacggagccacagaacccaaaccactgcaaacctggagaaaaatggaactgtcacagctcggggtgcgctcagagcaggacctgag

SEQ ID NO: 95051 - DNA, 600 bp, Chicken  19866894565176_3
gggacgcagccgcttctctgatacggatcagggaggtccgatcgaaaggaagacaaagctgagtgtcaggaatgtcggctgtacctgaaacatgacgtgctgagcacagcaggcagcgctgtcaaaacactcagatctttgcaggctgagcaatgctggcagctgtggccataaatgtctttattctgggccgatttggaaacaacagtgttgcatagcacagcacatgctgcagcaacacatctgcaacttccgtatcggggtctgaagagacaaactgcatctcctgagagcacatcrgctgtgacagaaacaaagcatcccagggggaagttacagctctgaacaatacagcaaagcctgagaggcagcagatttccataaacacaaacaacaaactggtagcaagaaggaaatacaaacaacacaataaggaacatcctatcagcatacgacttaaaagctaccaaagatctgaaggcaaaaccttctgttggtgctcctcctgtgtacacgcatagcagtaagaaacagaaggaaaatgaaaggctgaggccatctgaagccctccagctccatgccatggctcctttctctcat

SEQ ID NO: 95052 - DNA, 599 bp, Chicken  19866894565187_1
  misc_feature (1)..(104): n is any nucleotide
nnnnnnnnnnnnnnnnnnnnnnnnnnnnnnnnnnnnnnnnnnnnnnnnnnnnnnnnnnnnnnnnnnnnnnnnnnnnnnnnnnnnnnnnnnnnnnnnnnnnnnnncttcttcatgcagaagtataatttaatcccatttaattacttagggacagtataaacctgacagcgctgtatgtatagcagatacatttagccaatggtcctttttccatgttcatatttgagtcacagctttcagctttcctatattcactctaagacttgtaacaagtgcaatactcctcatttcttgccccarattgcaacagagcaatttgaatggtgcatttcagaggcagtgcaatcttctccatcacttctttcaaaccactagttgacagtatttattttccacatctcattccactcttgatattgatgttgaaattgccagcaaggatacaaattattatctgacagatttctcatgtggcaattgattcagtagcactcagttaatccatagccagccaaatgtgcatcaaacatcatcattctccttctattattcttgattcaggccaatcaaccacagcagaaagtcttaatctttgtttt

SEQ ID NO: 95053 - DNA, 581 bp, Chicken  19866894565187_2
tgcaacagagcaatttgaatggtgcatttcagaggcagtgcaatcttctccatcacttctttcaaaccactagttgacagtatttattttccacatctcattccactcttgatattgatgttgaaattgccagcaaggatacaaattattatctgacagatttctcatgtggcaattgattcagtagcactcagttaatccatagccagccaaatgtgcatcaaacatcatcattctccttctattattcttgattcaggccaatcaaccacagcagaaagtcttaatctttgtttttcyagcccctataagacacctagaataagactatttgcttttgcaatagtcttgcctggttatctcttgtcagtattccctttcaagtaattcttaatttcaagaacattcacaaataaaggaagtcatgccatgactttacctgaaaattaagggaaagttccggacacatagcttcatactgcccaagctcttcctctggccgatcaagccctggccttgacctcaatttgtttacatctgtctccaagtcataatcctacaaaaacagaaatagaaaaata

SEQ ID NO: 95054 - DNA, 600 bp, Chicken  19866894565188_1
agtttggatatggggaaaaatttattctctgaaagagtggtaatgcactggaatgggctgcccagagaggtgattgagtcacatccctggaggtattcaagaaacgtatagatgtggcactgagtgacatggttagtgggcacggtggtaatgggttgacagttgaaccagatgatcttagcagtcttttctaactttgatgatactaagattttatgaaattcttcttagattttatttttctaaaatgtacactgcacagcccttgagggttctgtccacacagaacaattacttctyattgctatatactaaagtaaaactaaagcaaatgtggagcatagatgcctggctgctaggcagctgctgacacagctaagtaagctaaaatagttcaggctaagacaagtctagagatgtctcaagactttgacctgccatgtcagcacaaggctttgtcatgccagaactcatgtttcctgggcaacaacaagacaagcagtgttgtctccatttttgcatgcacaactgaatagagtcatggaaataatctaatgtgatcaggaagacacatcctgcaggagtcctgggtcagaacca

SEQ ID NO: 95055 - DNA, 600 bp, Chicken  19866894565193_1
tcatttatttttgttggagaaagaaacaaagacagacaaactgactaaccagctgaaccaggccagtggccaaaccaactgtttgtgtcccactagtcatttcattccacagttgttcccctaacaaaactaagtattcaattcgcccaattgtttgtctaagagcaacaagacaatccagattcttctggatcgtttttaaacaaaagttgaatataatttcatattttgttcatttttgaaaagaatgagttggatgcatttaggcatttccatttgctaatacctattaaacaaccrgaatgaagccaactcacaagagtcttctcagctgatagaaacgtaaaattgggaatttctgcagttagtctggtgagtgctggcttgtggctggagagaaaagtgatttcctctataaattatgtttcagatgttccattacccaaaccagaactacacaataagcccaggtagaggaaaattgaagaacaggacaagatcctgccggacaaaactaaagggttttgcacttgatttacggtctcacagcctgagaacatacctcactagtgctgttgctatagtaacaaaaccagactg

SEQ ID NO: 95056 - DNA, 599 bp, Chicken  19866894565208_1
  misc_feature (1)..(143): n is any nucleotide
nnnnnnnnnnnnnnnnnnnnnnnnnnnnnnnnnnnnnnnnnnnnnnnnnnnnnnnnnnnnnnnnnnnnnnnnnnnnnnnnnnnnnnnnnnnnnnnnnnnnnnnnnnnnnnnnnnnnnnnnnnnnnnnnnnnnnnnnnnnnnnnccccctgaagggggcaaggcacaggaaaaaaaaaaatgtatctaacaagtgaagtagcttttatagaataacttcccaaagttactaaatcaatggagtagaactaagttaggggatgaatcttgggttatactaccaaaaaaaaaaagtggcaaargagtcataccttttcatgatagctttggaaactgggacccttcgactccacgttccctattattttgtaaaaacatgcagcagtccttctcagaccctgttttattgtatgttactatgtttgcattcatggatgagtaagcactccgaagctgtgaaaaactttgtgtttaacggctacttttcctaaatgcctattgaacatcagcaccaaaagacaagagtctgcatttgctatgtgctcaagagctgatgacctttgtaatttagctatgataatctgtgtagtctagcctataa

SEQ ID NO: 95057 - DNA, 600 bp, Chicken  19866894565220_1
attacaaattatcgtacaattcaagggaagacaagtggaaaatggtgtatgattgtaattccttcttgactcattagctattgaatcagacctcttttgccaggcatatgtgggacctggattgaactctaaaaggatatgagtttggaatttttacctcccaggaaaactcccatatacccaactttatccattatgattgttcaagctatccagccatgaccttactttttcattttgtccatggatttttatagaaaaactgaagagttaattaaaaatagtgaagcatatgctttkttacacatattacaagaaacatcaatttccaaaktttatttctagtttggtagatttagctgaaacctatgcacaaatacagaaaaaaatacccactcaagtgttcatgttttctagcacttgtaaatgctctctgacttcaactttgatgttcaaatcatatctatgtccagcctgcagtagtcaaggtctaaagtttctatcaagatatccaacttctgagttttacattatgatatttgagaaaaaatgttatatcccatacttcttggaatttaaatgatttactttaacttgagt

SEQ ID NO: 95058 - DNA, 600 bp, Chicken  19866894565220_2
gtggaaaatggtgtatgattgtaattccttcttgactcattagctattgaatcagacctcttttgccaggcatatgtgggacctggattgaactctaaaaggatatgagtttggaatttttacctcccaggaaaactcccatatacccaactttatccattatgattgttcaagctatccagccatgaccttactttttcattttgtccatggatttttatagaaaaactgaagagttaattaaaaatagtgaagcatatgctttkttacacatattacaagaaacatcaatttccaaaktttatttctagtttggtagatttagctgaaacctatgcacaaatacagaaaaaaatacccactcaagtgttcatgttttctagcacttgtaaatgctctctgacttcaactttgatgttcaaatcatatctatgtccagcctgcagtagtcaaggtctaaagtttctatcaagatatccaacttctgagttttacattatgatatttgagaaaaaatgttatatcccatacttcttggaatttaaatgatttactttaacttgagtatacaacagttataaacgtaatctagtatttttg

SEQ ID NO: 95059 - DNA, 600 bp, Chicken  19866894565222_1
tgttcataaccttgtagatctactcaaggaggtggcaggatgctacatcactgcacaggatgcagctactgctactgacagaagtctggtggctgcaaggactcctgcattgtactgcaaaatctttaggaattgtttcctcatggccttgttagccagggtcattccctttcctcagcccgtcttttcttctcttattgcactgtttcatcgctccccagtcttttagctgttatttctgctcttctccctgttcctttctctagatgttcacagattcgcacttgcttaatgtgttgktttttttttctatggtacttcctccccagtcctgatttctgtctcagtctcaatcttactaaaagatcttactctttatctcacttcatcagctcagcttccactgcttccttcccacattcaacaaaaacctcttttatttcacagttmaccatcatcccagttctcatgctttctctttctttccaagcttgctgtaatggttgccttttctactcctttcagtgtttgtctcttccgccttttccattttatggcgtcatcttaaatactagtctaaagtaggttgtgcagtaagtt

SEQ ID NO: 95060 - DNA, 589 bp, Chicken  19866894565222_2
gttagccagggtcattccctttcctcagcccgtcttttcttctcttattgcactgtttcatcgctccccagtcttttagctgttatttctgctcttctccctgttcctttctctagatgttcacagattcgcacttgcttaatgtgttgktttttttttctatggtacttcctccccagtcctgatttctgtctcagtctcaatcttactaaaagatcttactctttatctcacttcatcagctcagcttccactgcttccttcccacattcaacaaaaacctcttttatttcacagttmaccatcatcccagttctcatgctttctctttctttccaagcttgctgtaatggttgccttttctactcctttcagtgtttgtctcttccgccttttccattttatggcgtcatcttaaatactagtctaaagtaggttgtgcagtaagttggggctagactggggatgtgagtaaactaacaaattctattcaaagaagtattcagattcccaaagttctgatccagcaaagttttcagcagaccaaagctgcacagtcagagaaggtctcatggagccccagttttca

SEQ ID NO: 95061 - DNA, 600 bp, Chicken  19866894565231_1
gaaagatggggtggtactcaaaatcagccagaagatcagggtaggcctgagatttccgtttccagaggtaatactgtctctctgttttgacttctgtatgaatttttctgtgaattgcttctggatggcagcactagtttccccatagtttattaatctattttaatgctatttttgatacgatttaagactacctacactttatcagagtgagcaggtgctcctacattctctctgatgagctgtaatataaaagagcatacattgtcagcaatatttacaaccttctgaattgcttcytttaaaactatttgagagkttagctcagctttttccaaagtatgacctatcatacagcctgattaaacagttttcctcgcccacaacctattcctgcagcctattttccaagggtctgcaggcacgagcaggcagtggggtgctggttgaattcacwgttatctctgccyatgtcttgcctccttgtttacctgcctccacatgccccacatcattagataggcrtgcctccagctcatgataaaaacagtagcaccccycagtaaattaaggatgtacttctagtcccaggagtactct

SEQ ID NO: 95062 - DNA, 600 bp, Chicken  19866894565231_2
aaaatcagccagaagatcagggtaggcctgagatttccgtttccagaggtaatactgtctctctgttttgacttctgtatgaatttttctgtgaattgcttctggatggcagcactagtttccccatagtttattaatctattttaatgctatttttgatacgatttaagactacctacactttatcagagtgagcaggtgctcctacattctctctgatgagctgtaatataaaagagcatacattgtcagcaatatttacaaccttctgaattgcttcytttaaaactatttgagagkttagctcagctttttccaaagtatgacctatcatacagcctgattaaacagttttcctcgcccacaacctattcctgcagcctattttccaagggtctgcaggcacgagcaggcagtggggtgctggttgaattcacwgttatctctgccyatgtcttgcctccttgtttacctgcctccacatgccccacatcattagataggcrtgcctccagctcatgataaaaacagtagcaccccycagtaaattaaggatgtacttctagtcccaggagtactctcgtagatgtggctggatgc

SEQ ID NO: 95063 - DNA, 600 bp, Chicken  19866894565231_3
ctattttaatgctatttttgatacgatttaagactacctacactttatcagagtgagcaggtgctcctacattctctctgatgagctgtaatataaaagagcatacattgtcagcaatatttacaaccttctgaattgcttcytttaaaactatttgagagkttagctcagctttttccaaagtatgacctatcatacagcctgattaaacagttttcctcgcccacaacctattcctgcagcctattttccaagggtctgcaggcacgagcaggcagtggggtgctggttgaattcacwgttatctctgccyatgtcttgcctccttgtttacctgcctccacatgccccacatcattagataggcrtgcctccagctcatgataaaaacagtagcaccccycagtaaattaaggatgtacttctagtcccaggagtactctcgtagatgtggctggatgctgtatgtgygctgcgatgtctaatagatttggttcttttctgtatgatgtcttgatagccttcccttgtgatactggtgcttgttgatgccacttggtatagtgcctcctctacctcttagatagagatcacggtatt

SEQ ID NO: 95064 - DNA, 600 bp, Chicken  19866894565231_4
atttttgatacgatttaagactacctacactttatcagagtgagcaggtgctcctacattctctctgatgagctgtaatataaaagagcatacattgtcagcaatatttacaaccttctgaattgcttcytttaaaactatttgagagkttagctcagctttttccaaagtatgacctatcatacagcctgattaaacagttttcctcgcccacaacctattcctgcagcctattttccaagggtctgcaggcacgagcaggcagtggggtgctggttgaattcacwgttatctctgccyatgtcttgcctccttgtttacctgcctccacatgccccacatcattagataggcrtgcctccagctcatgataaaaacagtagcaccccycagtaaattaaggatgtacttctagtcccaggagtactctcgtagatgtggctggatgctgtatgtgygctgcgatgtctaatagatttggttcttttctgtatgatgtcttgatagccttcccttgtgatactggtgcttgttgatgccacttggtatagtgcctcctctacctcttagatagagatcacggtatttatcactccgtga

SEQ ID NO: 95065 - DNA, 600 bp, Chicken  19866894565231_5
acattctctctgatgagctgtaatataaaagagcatacattgtcagcaatatttacaaccttctgaattgcttcytttaaaactatttgagagkttagctcagctttttccaaagtatgacctatcatacagcctgattaaacagttttcctcgcccacaacctattcctgcagcctattttccaagggtctgcaggcacgagcaggcagtggggtgctggttgaattcacwgttatctctgccyatgtcttgcctccttgtttacctgcctccacatgccccacatcattagataggcrtgcctccagctcatgataaaaacagtagcaccccycagtaaattaaggatgtacttctagtcccaggagtactctcgtagatgtggctggatgctgtatgtgygctgcgatgtctaatagatttggttcttttctgtatgatgtcttgatagccttcccttgtgatactggtgcttgttgatgccacttggtatagtgcctcctctacctcttagatagagatcacggtatttatcactccgtgattggcaagatatcccgtatgtgaaaaatgacttacaggatttgtaagttatactt

SEQ ID NO: 95066 - DNA, 600 bp, Chicken  19866894565231_6
tacattgtcagcaatatttacaaccttctgaattgcttcytttaaaactatttgagagkttagctcagctttttccaaagtatgacctatcatacagcctgattaaacagttttcctcgcccacaacctattcctgcagcctattttccaagggtctgcaggcacgagcaggcagtggggtgctggttgaattcacwgttatctctgccyatgtcttgcctccttgtttacctgcctccacatgccccacatcattagataggcrtgcctccagctcatgataaaaacagtagcaccccycagtaaattaaggatgtacttctagtcccaggagtactctcgtagatgtggctggatgctgtatgtgygctgcgatgtctaatagatttggttcttttctgtatgatgtcttgatagccttcccttgtgatactggtgcttgttgatgccacttggtatagtgcctcctctacctcttagatagagatcacggtatttatcactccgtgattggcaagatatcccgtatgtgaaaaatgacttacaggatttgtaagttatacttttatgcttggataattttaaagaaaataagaaact

SEQ ID NO: 95067 - DNA, 600 bp, Chicken  19866894565231_7
ctttttccaaagtatgacctatcatacagcctgattaaacagttttcctcgcccacaacctattcctgcagcctattttccaagggtctgcaggcacgagcaggcagtggggtgctggttgaattcacwgttatctctgccyatgtcttgcctccttgtttacctgcctccacatgccccacatcattagataggcrtgcctccagctcatgataaaaacagtagcaccccycagtaaattaaggatgtacttctagtcccaggagtactctcgtagatgtggctggatgctgtatgtgygctgcgatgtctaatagatttggttcttttctgtatgatgtcttgatagccttcccttgtgatactggtgcttgttgatgccacttggtatagtgcctcctctacctcttagatagagatcacggtatttatcactccgtgattggcaagatatcccgtatgtgaaaaatgacttacaggatttgtaagttatacttttatgcttggataattttaaagaaaataagaaactattaagatctctcatgtatattaatattcatgcctgaatcacagcagatgtcttgttcttgcattctt

SEQ ID NO: 95068 - DNA, 600 bp, Chicken  19866894565241_1
gataacgccgttttggcagagagtgccggcacaggtgtgcatcgttatcttaattaagatccggagaaaacatcatctttcagcgtgaattatgaagggagatgcatgaggagatcatttcagtgttggttttttttttttccttctcccaccggcagagagagggaggtgatttcccacccactttctggtatttctgtatcacagttcctgacctattatactcgtgctgaatgatctgtttcccccatagtttgggaatgcattgcctggaggacctgggaaaagccgttgtgtccraggctgcccctatgagccacataggaagactttgggctgcaggggaaattgacagctaggagtgttttatgtcatgcatttaaaggtgcaggcaacttgcattagtagcagaacaaaacttacgtgtgtgtgtgtrtatatatgtatttttttaattgtaaagaaaaaaatattttattgttctcacttttacagtaccatggaacaaactttacaatactaaaactaattagctgcaaagagtggtgaggggctcacactgttctgttaaagcaacacaggactcactgaacaggagct

SEQ ID NO: 95069 - DNA, 600 bp, Chicken  19866894565241_2
tttttccttctcccaccggcagagagagggaggtgatttcccacccactttctggtatttctgtatcacagttcctgacctattatactcgtgctgaatgatctgtttcccccatagtttgggaatgcattgcctggaggacctgggaaaagccgttgtgtccraggctgcccctatgagccacataggaagactttgggctgcaggggaaattgacagctaggagtgttttatgtcatgcatttaaaggtgcaggcaacttgcattagtagcagaacaaaacttacgtgtgtgtgtgtrtatatatgtatttttttaattgtaaagaaaaaaatattttattgttctcacttttacagtaccatggaacaaactttacaatactaaaactaattagctgcaaagagtggtgaggggctcacactgttctgttaaagcaacacaggactcactgaacaggagctaaaaccacctacacaatgctctggcagtgagctgtgggctgccctcctgcaagcactgctgtgtgtgcggctgctgccctgagtagggcaccgggtggtgcagggctgtgcatgcagtgcgagtcctgtgtgactt

SEQ ID NO: 95070 - DNA, 600 bp, Chicken  19866894565252_1
gtggtagcagaaagtttgtcaaaacagggaagtgaaacttgaatacaaggcagcagcctcatctcctgcctctgcttctgaagcagtttttcccctagtgaaaataaaaataaatcaagcctgaaatcgtggtctgggaaacaaaacaataaaaaaggaacgtcttcatccctgttcacgtgtgtcaaaagccccaactgcagtgtgtagcagagctcgagatcagcaagctgttgggtagattttgggagaacttcgccagctgtgtttggaggagctcacagaagaaagctcacagtrctgtgtgttgtgtacggtgtgcatcgtgcgagctgtaatggccgcaccgtcgggcaccggtgtggttttgtgcttaaagagcaggtatctgggaagtgcagaagagcaacagaggaaggacaacagaaatggtgaaaggtctagagggtaagatgtgtgaggagcagctgaagtccctcggtttgttcagcctggagcacaggaggctgagggaaggcctcatggcggcctgcagctcctcatggcggcctgcagctcctcatggcggcctgcagctcctcatggcggcctatggcttcc

SEQ ID NO: 95071 - DNA, 600 bp, Chicken  19866894565256_1
tctgaatatgtttctcagactgctcaaagtgtctttaatgtccaagaaagtcaatacaggctggccaaacaggaaagaaaacacacaagcaaaaccctgaggagtataatagaaaagacagattaaaaaaaaacaacaacaacaaaaacagcaaacaaaagatgtttctatcaaggaacatcacacacaaaggacaacactcagagagaagacaggaaaagcatatagcaacagaacacagagcaagataagaaaaggagcaaaacacatttacttatgagtgctacaatgaaagtaatrcctcttattttattattactttggcccacaacagcagaggtgggtactggtgatatggtagtagaggctgaacctccccaccaatgttcccttgcattttgttgccatktgacagatagtaacaaaaggacagtctgacaaaatagtgcctgacacggaagtgtgtatgaagsaaaggtgyctcactgaattcctccacatggaaaaaaactgtactcactgacattcatcagtgcttgctgaatgcttttgaagagtacagagtggacatgagtacagcgagactgtgggtcgtgtgtt

SEQ ID NO: 95072 - DNA, 600 bp, Chicken  19866894565256_2
tagaaaagacagattaaaaaaaaacaacaacaacaaaaacagcaaacaaaagatgtttctatcaaggaacatcacacacaaaggacaacactcagagagaagacaggaaaagcatatagcaacagaacacagagcaagataagaaaaggagcaaaacacatttacttatgagtgctacaatgaaagtaatrcctcttattttattattactttggcccacaacagcagaggtgggtactggtgatatggtagtagaggctgaacctccccaccaatgttcccttgcattttgttgccatktgacagatagtaacaaaaggacagtctgacaaaatagtgcctgacacggaagtgtgtatgaagsaaaggtgyctcactgaattcctccacatggaaaaaaactgtactcactgacattcatcagtgcttgctgaatgcttttgaagagtacagagtggacatgagtacagcgagactgtgggtcgtgtgtttcatcagtgacaactgtgggtcacctccccagtgcaaatttttatgagagctacaggcaggctcttgtccattgctgacaaaaatgtatagctaatgggtggtgactgt

SEQ ID NO: 95073 - DNA, 600 bp, Chicken  19866894565256_3
aggaacatcacacacaaaggacaacactcagagagaagacaggaaaagcatatagcaacagaacacagagcaagataagaaaaggagcaaaacacatttacttatgagtgctacaatgaaagtaatrcctcttattttattattactttggcccacaacagcagaggtgggtactggtgatatggtagtagaggctgaacctccccaccaatgttcccttgcattttgttgccatktgacagatagtaacaaaaggacagtctgacaaaatagtgcctgacacggaagtgtgtatgaagsaaaggtgyctcactgaattcctccacatggaaaaaaactgtactcactgacattcatcagtgcttgctgaatgcttttgaagagtacagagtggacatgagtacagcgagactgtgggtcgtgtgtttcatcagtgacaactgtgggtcacctccccagtgcaaatttttatgagagctacaggcaggctcttgtccattgctgacaaaaatgtatagctaatgggtggtgactgtgttgaaagagtgtcttgtagatgaaaatttgctctaccagagttttattggggtctttatatct

SEQ ID NO: 95074 - DNA, 600 bp, Chicken  19866894565256_4
cacacacaaaggacaacactcagagagaagacaggaaaagcatatagcaacagaacacagagcaagataagaaaaggagcaaaacacatttacttatgagtgctacaatgaaagtaatrcctcttattttattattactttggcccacaacagcagaggtgggtactggtgatatggtagtagaggctgaacctccccaccaatgttcccttgcattttgttgccatktgacagatagtaacaaaaggacagtctgacaaaatagtgcctgacacggaagtgtgtatgaagsaaaggtgyctcactgaattcctccacatggaaaaaaactgtactcactgacattcatcagtgcttgctgaatgcttttgaagagtacagagtggacatgagtacagcgagactgtgggtcgtgtgtttcatcagtgacaactgtgggtcacctccccagtgcaaatttttatgagagctacaggcaggctcttgtccattgctgacaaaaatgtatagctaatgggtggtgactgtgttgaaagagtgtcttgtagatgaaaatttgctctaccagagttttattggggtctttatatctgctggagt

SEQ ID NO: 95075 - DNA, 600 bp, Chicken  19866894565261_1
tggagacaggtgagagcagattagagttgcttcctagcttctgatgagtaccaaggaggaaaatggctgaagacgtatttagaaagctacagtttaagatgacctttgcacgtctaattcctcagatacttaaataccatggttgctgtatagaacaggactagagggaataggctcaagctacaccaggttggatattatggaaaatttattctccaaaaaagtggtcagatgctgaaataggctgcccaaggaagtggtagagtcattgtacctggaggtgttcaagaaatgtttagwtgttgtactgagtgacctggtttagtgaggaaatattggtggtaggtggacagttggactggatgatcttggaggtcttttccaaccttgacaattctatgattctagacaaacaaaagctttgtatcaagcaagcctggtattaaattgccaaaagacagaagccagtgctgtaaaacaaagataaagtagtctatgctaaaaggtaaatcaatggacattatgtgaaggcagtaaacaggaccatttctacatgaaattcacaagccagatacagatggcatcagcagtactccaggc

SEQ ID NO: 95076 - DNA, 600 bp, Chicken  19866894565296_1
tttctgtggcacccagggcaggggtatcaccagctgcacaggtgctgcaatttaagggaagtgcagaactggagtgagttgagaggcaatcagccagaagatgcctctcagttgatctctgttagacaaggctggaccatcagggagcatcctgcctagaaaagatctgcaaattccacccccctcccccccccatcttcagctaggcaaaagtgaacaaaagcaattctgcactcctgcttgataggacaaggagtaacaatatggactgcaaccatgggagatcagggggaaatatcygagagagaaatccctccgagcagcatgttaaagtactcctcrctgcaaatggagaacagatgagagaaatatatcaggaataacctaaggtaaagctggcccttcttgaagcagggctcagcaacgtggttacttaaggctccttccaggcttgttcctcctattgctttcagctctggaactgctcctctctgatcagcacccaggtttgttttcagagcgttacacacaggctggtctaacagacaaacacagaagccattctctggcagtcgtattcccaaccctcagcacagtctg

SEQ ID NO: 95077 - DNA, 600 bp, Chicken  19866894565296_2
tgctgcaatttaagggaagtgcagaactggagtgagttgagaggcaatcagccagaagatgcctctcagttgatctctgttagacaaggctggaccatcagggagcatcctgcctagaaaagatctgcaaattccacccccctcccccccccatcttcagctaggcaaaagtgaacaaaagcaattctgcactcctgcttgataggacaaggagtaacaatatggactgcaaccatgggagatcagggggaaatatcygagagagaaatccctccgagcagcatgttaaagtactcctcrctgcaaatggagaacagatgagagaaatatatcaggaataacctaaggtaaagctggcccttcttgaagcagggctcagcaacgtggttacttaaggctccttccaggcttgttcctcctattgctttcagctctggaactgctcctctctgatcagcacccaggtttgttttcagagcgttacacacaggctggtctaacagacaaacacagaagccattctctggcagtcgtattcccaaccctcagcacagtctgcatctcctgctggtaatgccagcagcaacactaatttgcagc

SEQ ID NO: 95078 - DNA, 599 bp, Chicken  19866894565317_1
  misc_feature (1)..(175): n is any nucleotide
nnnnnnnnnnnnnnnnnnnnnnnnnnnnnnnnnnnnnnnnnnnnnnnnnnnnnnnnnnnnnnnnnnnnnnnnnnnnnnnnnnnnnnnnnnnnnnnnnnnnnnnnnnnnnnnnnnnnnnnnnnnnnnnnnnnnnnnnnnnnnnnnnnnnnnnnnnnnnnnnnnnnnnnnnnnnnnnttggataacaagcagctggttactgctgagtgcattaccaagatggtgtagcagagaaaccctatataaaaacgacacgaagaaacctttctcattgcaacactgccagagatgcactaaaaatycaacctgaattgtattttccatttcacagacacaaaacttagtcttgggtgcagttctgagaatttattagtatctctcaaagcccccctcccgcctgmtcctaatttctatgtttgggcaggcattgtcttggggcaaactttgccatgctagaaatagagagagaaaacagcagtatttgtacaggtctattgtggttggattcacagataagcaggaggcaaagaaaattcacacagcatcttgtatactgctgctgtaatgtatgtccttgttgcttggatacctccagtgaatt

SEQ ID NO: 95079 - DNA, 599 bp, Chicken  19866894565317_2
  misc_feature (1)..(76): n is any nucleotide
nnnnnnnnnnnnnnnnnnnnnnnnnnnnnnnnnnnnnnnnnnnnnnnnnnnnnnnnnnnnnnnnnnnnnnnnnnnnttggataacaagcagctggttactgctgagtgcattaccaagatggtgtagcagagaaaccctatataaaaacgacacgaagaaacctttctcattgcaacactgccagagatgcactaaaaatycaacctgaattgtattttccatttcacagacacaaaacttagtcttgggtgcagttctgagaatttattagtatctctcaaagcccccctcccgcctgmtcctaatttctatgtttgggcaggcattgtcttggggcaaactttgccatgctagaaatagagagagaaaacagcagtatttgtacaggtctattgtggttggattcacagataagcaggaggcaaagaaaattcacacagcatcttgtatactgctgctgtaatgtatgtccttgttgcttggatacctccagtgaattaccaagtaggggtgtgagtctctttcctagttggtattaaataaaaaaatccctacctaccgctctgtaagaggtagaagatgcacatggaggcttcct

SEQ ID NO: 95080 - DNA, 600 bp, Chicken  19866894565317_3
ttgccatgctagaaatagagagagaaaacagcagtatttgtacaggtctattgtggttggattcacagataagcaggaggcaaagaaaattcacacagcatcttgtatactgctgctgtaatgtatgtccttgttgcttggatacctccagtgaattaccaagtaggggtgtgagtctctttcctagttggtattaaataaaaaaatccctacctaccgctctgtaagaggtagaagatgcacatggaggcttcctgagtgcttgccagccaagtgccataaaaagacagatcgagccaygagaattttaaatcttgtgggtttctgcgccatgttatgaactagatctcatacaattcatcacccaagttacaaaaaaatagttcaagaactcaaaataatgaattctgtcatttccaatagatgtgtgaaggggagaattatgaatgaaccttttaaaacacgtatgtggaggggagattgcccttctacaaaatgaaagcagcaggcttctatttaaatggtccaatcctgaaaccgagacctttcattttcaattaacttaaattgacaattgagaaaagggttgaaaatgttgtt

SEQ ID NO: 95081 - DNA, 600 bp, Chicken  19866894565318_1
ctcagcagctccccataagatgtgtgctccaaagccctcagagctttgttgcccttctctggacacactccagggtctcaatatctttcttgcagcgaagggcccaacactgaacacagcactgaggtgcagcctcaccaatgctatgcaaggactagaaccacaaggatttacagctatatccccactgcctggcaaagggttttgaactctgaatgaggatcccaagtcctgggaatggccctgggatacagcccagctcccagacaggctctgtgtgctcagttgcccagatgcccragtgatagatggtaatcctcagctgcttctcctctgcaaggaacatgtagaaacattaataaatattttaaaagcttctacaatggaccgagcttttagacatgcattccacaatactttattasccttaataaccttcaaattctgaatgaacacaaagaacctattttaagcgtgcagttgcaaatgccaaacaggattttcaaatacagcaggcagcacaagggagaaattacaagtctcttcactttcatcccaagttttctgcatcaagaaaaggtactgagaagttattcagaa

SEQ ID NO: 95082 - DNA, 600 bp, Chicken  19866894565318_2
ggtgcagcctcaccaatgctatgcaaggactagaaccacaaggatttacagctatatccccactgcctggcaaagggttttgaactctgaatgaggatcccaagtcctgggaatggccctgggatacagcccagctcccagacaggctctgtgtgctcagttgcccagatgcccragtgatagatggtaatcctcagctgcttctcctctgcaaggaacatgtagaaacattaataaatattttaaaagcttctacaatggaccgagcttttagacatgcattccacaatactttattasccttaataaccttcaaattctgaatgaacacaaagaacctattttaagcgtgcagttgcaaatgccaaacaggattttcaaatacagcaggcagcacaagggagaaattacaagtctcttcactttcatcccaagttttctgcatcaagaaaaggtactgagaagttattcagaacctcaccatgctttttttggttgcttcacttttattttaactcattgtgagatctttaaggaaactcctctatgaatcagtgtatttataccaccagcactggataaaaamcttgccacttacag

SEQ ID NO: 95083 - DNA, 530 bp, Chicken  19866894565318_3
caatactttattasccttaataaccttcaaattctgaatgaacacaaagaacctattttaagcgtgcagttgcaaatgccaaacaggattttcaaatacagcaggcagcacaagggagaaattacaagtctcttcactttcatcccaagttttctgcatcaagaaaaggtactgagaagttattcagaacctcaccatgctttttttggttgcttcacttttattttaactcattgtgagatctttaaggaaactcctctatgaatcagtgtatttataccaccagcactggataaaaamcttgccacttacagtaggttaatatgaaaaaatcaaatagccaaatctggaaaggatttaaaagctagatgcaggttacatgctccacttcaatatttacttacatccctggttttcccccgaaagcccctcaaaacaacaatgtacagcatgcaagagcacatggatagccctatttcctgggggctcagacgtggcctgcaggagccctggaaaccaagcacttgcac

SEQ ID NO: 95084 - DNA, 600 bp, Chicken  19866894565326_1
tggcagggtgcagccagtcttagttgggctgttataggtgctcttaaagccaaggggctttaagataaaagctctttaagataaaagagatcgagctccaagagatactccagcatgggctgaagagggcactgagctacctggtttagctagcagggatttgagcaggtgatttccagaggtccctttcaacacacattgctgtacatcccctgctttgtcagagagtcaacgtgctccagatggtggtggaaatgtcaggcacacaaactgacccaatcccagccagctcacaacacrttaactacacccattaccttcatctcttcccatattctcttctatgcttcccacagaaactgcactgccaacactgcgatggcagagcccttcagagttcttctgcaggggtgccatgattatgatcataagtttcccgtaatgataatggagataaccataataccatttccaaccgaggtaggctatgaatttgtataaaatacatataaaattatttctagatttttaagctcggagccaacaggagttttttttatcataatgattttgtattgacataacaacgactttcagcta

SEQ ID NO: 95085 - DNA, 600 bp, Chicken  19866894565338_1
tgaaatggtattcatctgtcaatgatatttcttttcttttgccagccagatgtctgttctcaggctttaagaatctccttccttttttccttcacatcacacatacttggtacttagccagctcacagaaagcactacccttttctttctcactgcatcttcaaaatttctccaggcaaataagtcccatggtctccgtaaatccccctcctggaggttatctccagtttaccaactgtgaactaactgagcataccacctgtcaggaaggagaagcttctgaattagaaacaagctctkaaacaaggaggtacgatacacaaagggtgatgtgtcagaaatgtcgtgtcaacaggatttcccattgaattacttcctcccctgcacaggacgttggtagctgaataaaaataaatattcttttattttctataaaaatgtatttggacaacaatttgtatttccctttatctccatcattttttttattgggaaccatctgttgagggagggtgggtgaagaggaagaaagggctaggatttccatcagtagtattaatagtgaacagctcacaaatacgacatacttttggtctttct

SEQ ID NO: 95086 - DNA, 600 bp, Chicken  19866894565344_1
ggggtattgcagtcttgaagacccacccgtctctctttcatggaatttgctacttgacaggttgattgcttagaattatattgagcacacatggaaaatatctttttaaacctgtgagtaatgagtgtaagagaaattgaaagagtataatttcagcatatgctgccgttttccagctagtattagaaatggaaatttgaactctatttcaatgtttcttggatgtgcattgcattgacataattatttaaattatgtctaaccttaggtattcacagtttgatctctttctatccaaawgttctgaaatgataggagatgtacaacatttaaaagagttaaaatttggggtagaaaatattttcttcaagatattttaacttgtgtaaataatccactttaaaattcactaagtaccagtgtacatgttcttatactcacagatgttcttcagaaataaattcaacaaagtctgttagaaatagttcagaatagaattgtacttttactttgagtaagatgaagtcacataatttgaggcttatgaaaagttcttttagaaaaactaataattaggtgctttagagtgcagtaggacag

SEQ ID NO: 95087 - DNA, 599 bp, Chicken  19866894565345_1
  misc_feature (1)..(29): n is any nucleotide
nnnnnnnnnnnnnnnnnnnnnnnnnnnnnttatgatgccagctacaaaataccatcccagtacaaaacaactagtgtcactcaatttcactgaaataagatggtagactctttagagtatattccccttatttgcaagtaagttttggaggcagtagaagtcagtaagcagctgaccaggtaaagatgagttaattaaaagcttcatggttagggcttttgttttatttgctggggggcagcttaggccacatagaactgcaaagcccctgacggctttaaatccaacctattctatttrtgaatttcttgctagttgaggatataagacctaataaataatgttctattgtaactcacagactgcatggttcaccagaggcaatacaatgtagttcatatggtatgcactgggagtcaggagggcacrtgctaatgatctgctgaggatttgggggaattctccagcagcaatcacactaccagagaaacaagccaagagaaggtagtcattagtgtccatttcacttacaaaactgagtattggtacccaaatcatggagcttctttttgttttacagcctgtctactcagcaatga

SEQ ID NO: 95088 - DNA, 600 bp, Chicken  19866894565345_2
atttgcaagtaagttttggaggcagtagaagtcagtaagcagctgaccaggtaaagatgagttaattaaaagcttcatggttagggcttttgttttatttgctggggggcagcttaggccacatagaactgcaaagcccctgacggctttaaatccaacctattctatttrtgaatttcttgctagttgaggatataagacctaataaataatgttctattgtaactcacagactgcatggttcaccagaggcaatacaatgtagttcatatggtatgcactgggagtcaggagggcacrtgctaatgatctgctgaggatttgggggaattctccagcagcaatcacactaccagagaaacaagccaagagaaggtagtcattagtgtccatttcacttacaaaactgagtattggtacccaaatcatggagcttctttttgttttacagcctgtctactcagcaatgaataatctcagggaaagagacattttagaacaaaattaatagtaaaagagagtacgtatgtcagytgtactatttgacttaaactgcaagtggcaagagtgtggcttctcagtaagaatcttgttaatcat

SEQ ID NO: 95089 - DNA, 600 bp, Chicken  19866894565345_3
tgcatggttcaccagaggcaatacaatgtagttcatatggtatgcactgggagtcaggagggcacrtgctaatgatctgctgaggatttgggggaattctccagcagcaatcacactaccagagaaacaagccaagagaaggtagtcattagtgtccatttcacttacaaaactgagtattggtacccaaatcatggagcttctttttgttttacagcctgtctactcagcaatgaataatctcagggaaagagacattttagaacaaaattaatagtaaaagagagtacgtatgtcagytgtactatttgacttaaactgcaagtggcaagagtgtggcttctcagtaagaatcttgttaatcatgcggaaatcaaagtgctacctaaacaccttgytagaagtggaggagatgtgtcctctgtctgaagtaatatcgtgccttgacagattgcagacatttagcagcaactgaatagtaaatagcttcacaaaatattcacggttcgatcataaagatattgtggtaggaagtaaaaaaaagtttttccctcatttgcttctccaactgtgcagyaacagagtatatgtaattgttta

SEQ ID NO: 95090 - DNA, 600 bp, Chicken  19866894565345_4
ctccagcagcaatcacactaccagagaaacaagccaagagaaggtagtcattagtgtccatttcacttacaaaactgagtattggtacccaaatcatggagcttctttttgttttacagcctgtctactcagcaatgaataatctcagggaaagagacattttagaacaaaattaatagtaaaagagagtacgtatgtcagytgtactatttgacttaaactgcaagtggcaagagtgtggcttctcagtaagaatcttgttaatcatgcggaaatcaaagtgctacctaaacaccttgytagaagtggaggagatgtgtcctctgtctgaagtaatatcgtgccttgacagattgcagacatttagcagcaactgaatagtaaatagcttcacaaaatattcacggttcgatcataaagatattgtggtaggaagtaaaaaaaagtttttccctcatttgcttctccaactgtgcagyaacagagtatatgtaattgtttaaaaatatgccaaagtataacatttcatagaggcagccgtgtcagtgttggaaatgctatttaaaarggtacgtggtgagagaatcttctaagccgtaa

SEQ ID NO: 95091 - DNA, 600 bp, Chicken  19866894565345_5
taaaagagagtacgtatgtcagytgtactatttgacttaaactgcaagtggcaagagtgtggcttctcagtaagaatcttgttaatcatgcggaaatcaaagtgctacctaaacaccttgytagaagtggaggagatgtgtcctctgtctgaagtaatatcgtgccttgacagattgcagacatttagcagcaactgaatagtaaatagcttcacaaaatattcacggttcgatcataaagatattgtggtaggaagtaaaaaaaagtttttccctcatttgcttctccaactgtgcagyaacagagtatatgtaattgtttaaaaatatgccaaagtataacatttcatagaggcagccgtgtcagtgttggaaatgctatttaaaarggtacgtggtgagagaatcttctaagccgtaattaattggtttcataaaatgttttcagataaacaatgtgaagaatgttatttcttgtatatctttggaacatataaatgtgcacaatgaaaactgaaagagctacctctgcagctggagtgactcaagatttccacgtttgtgccagtcgtacacatagtattctaactcaggattctg

SEQ ID NO: 95092 - DNA, 600 bp, Chicken  19866894565345_6
gcggaaatcaaagtgctacctaaacaccttgytagaagtggaggagatgtgtcctctgtctgaagtaatatcgtgccttgacagattgcagacatttagcagcaactgaatagtaaatagcttcacaaaatattcacggttcgatcataaagatattgtggtaggaagtaaaaaaaagtttttccctcatttgcttctccaactgtgcagyaacagagtatatgtaattgtttaaaaatatgccaaagtataacatttcatagaggcagccgtgtcagtgttggaaatgctatttaaaarggtacgtggtgagagaatcttctaagccgtaattaattggtttcataaaatgttttcagataaacaatgtgaagaatgttatttcttgtatatctttggaacatataaatgtgcacaatgaaaactgaaagagctacctctgcagctggagtgactcaagatttccacgtttgtgccagtcgtacacatagtattctaactcaggattctggaaatagtctcaggaatgtatttattagcacgaattagcaagaattacttgtagaaatgatacggcaaagaattataaatgtgaaaaca

SEQ ID NO: 95093 - DNA, 600 bp, Chicken  19866894565347_1
ccttatggtgatgcattttatggattttaagtgaaacatgtactgtatcacatggcattatatcatcaggctcctgtccattgaacaacgttaaaaagctgggtcataaaaaactaggattcttgtcccatcagaaagtttgcttatccagctccttcctatcctgggaaaaatacaagcacatttttcttctcacatactgtacacacgattcatatcaaaattcaatcatgctcaattaacactcaaaaatttccaataattatgctgaaggcagcaccagcacacacaaagcgataygggaatcagggactaagctgtgcataaattcactaataagagaaaaggtcacagtttgatattaytgaaatttgattagatttcagatccttgtgctaaaaatcaatgtttttttggcttcagcctttgtgctctggagtcagccaatctctggggccctgcgtataatcagaggctgtaccagtgttacatcctctcctgggcacaaagatagaagaaattagaaaggatttacaggtcagagcagtcaggatttgccattcctacagctgaagggtttgggaagctgaaaaggaaaag

SEQ ID NO: 95094 - DNA, 600 bp, Chicken  19866894565347_2
tcaggctcctgtccattgaacaacgttaaaaagctgggtcataaaaaactaggattcttgtcccatcagaaagtttgcttatccagctccttcctatcctgggaaaaatacaagcacatttttcttctcacatactgtacacacgattcatatcaaaattcaatcatgctcaattaacactcaaaaatttccaataattatgctgaaggcagcaccagcacacacaaagcgataygggaatcagggactaagctgtgcataaattcactaataagagaaaaggtcacagtttgatattaytgaaatttgattagatttcagatccttgtgctaaaaatcaatgtttttttggcttcagcctttgtgctctggagtcagccaatctctggggccctgcgtataatcagaggctgtaccagtgttacatcctctcctgggcacaaagatagaagaaattagaaaggatttacaggtcagagcagtcaggatttgccattcctacagctgaagggtttgggaagctgaaaaggaaaagctgcagttgctggtgaagtgaagcaactggttatgttggttatgctcataagaaaggtaaagctg

SEQ ID NO: 95095 - DNA, 599 bp, Chicken  19866894565350_1
  misc_feature (1)..(16): n is any nucleotide
nnnnnnnnnnnnnnnncagaattgtcctacatataccaatgtaaactgagctatccaagagaaatttaaaaaaaaatcattttttgttcttctcattttattcactgaaggctatatatttgacagaattgtaaaagcaaggtattaatgtggcatgaaataaagtcctgcatcaacaattaaaagacataaagtcagagctttacctttttaaactgtgttgttatttattgtaaattttgaaaagtgaaaaacagtatagaccaagaagcagaattcaatccatgcagttgtaagagyaaaaaaaaaaaaaaaaaagtatttyttttagaatagattttaccttttttcattattcctctgagtccttctttgtatgtgctgtctgtcaagacatacaagtgttcacagccctgtatctgctcaatgtagtagtttatgttatggtgtagttttccacaagaaaaatagttatgggcatcatcttttctcaggaaaatggaatttatctaagtcccatttttccagtttattcatgatggttcttgcagtggtactttcttctatggtttataaatgactaatgattgttgcttatg

SEQ ID NO: 95096 - DNA, 600 bp, Chicken  19866894565350_2
cctacatataccaatgtaaactgagctatccaagagaaatttaaaaaaaaatcattttttgttcttctcattttattcactgaaggctatatatttgacagaattgtaaaagcaaggtattaatgtggcatgaaataaagtcctgcatcaacaattaaaagacataaagtcagagctttacctttttaaactgtgttgttatttattgtaaattttgaaaagtgaaaaacagtatagaccaagaagcagaattcaatccatgcagttgtaagagaaaaaaaaaaaaaaaaaaagtatttyttttagaatagattttaccttttttcattattcctctgagtccttctttgtatgtgctgtctgtcaagacatacaagtgttcacagccctgtatctgctcaatgtagtagtttatgttatggtgtagttttccacaagaaaaatagttatgggcatcatcttttctcaggaaaatggaatttatctaagtcccatttttccagtttattcatgatggttcttgcagtggtactttcttctatggtttataaatgactaatgattgttgcttatgctgtactaattgctctgcaagctaga

SEQ ID NO: 95097 - DNA, 599 bp, Chicken  19866894565358_1
  misc_feature (1)..(14): n is any nucleotide
nnnnnnnnnnnnnnagaaagcgatagcaggttggcaccctctatttgaccccaagacttccctgtgctgagctatggagctgaaatgctggcagctcagtgggcaggcgatgcattccctgtctgggcgaggacaggcatcctgcctcactgctgcaccataatcggagggcagcgacctcacagctgcgaactataaccttttagaaagtgtttagtgcagtatttatggcagccattatttttactgtgttttcactttgagaaggaaaacagagcaaatgtttacagcagcttaacraaatgagacccacaggtgaggcaaggcaaggcattaacctcagccagcccagcccacctggcagcccatggctggccctcggtgggaaccaaagggrgtggaaacagaaagtaaaagtttctttccctgcttcagtttttgtttgtttctttaaggaacagactgtttcagaaaaataaacacacagaagggctcagggcaaagatacattttgtatacagctttaatgaaaacatgtttttcttgttaacaccttgttatatcctaaaatcacaatacagaaaaaactgtgaataagg

SEQ ID NO: 95098 - DNA, 600 bp, Chicken  19866894565358_2
agtgggcaggcgatgcattccctgtctgggcgaggacaggcatcctgcctcactgctgcaccataatcggagggcagcgacctcacagctgcgaactataaccttttagaaagtgtttagtgcagtatttatggcagccattatttttactgtgttttcactttgagaaggaaaacagagcaaatgtttacagcagcttaacraaatgagacccacaggtgaggcaaggcaaggcattaacctcagccagcccagcccacctggcagcccatggctggccctcggtgggaaccaaagggrgtggaaacagaaagtaaaagtttctttccctgcttcagtttttgtttgtttctttaaggaacagactgtttcagaaaaataaacacacagaagggctcagggcaaagatacattttgtatacagctttaatgaaaacatgtttttcttgttaacaccttgttatatcctaaaatcacaatacagaaaaaactgtgaataaggctgtgtgcatagacatctcagatttttaatgaaattcaccaccagcatcgcttcccccacatgctgtcgctacggcggcatctcccagtggcatgaac

SEQ ID NO: 95099 - DNA, 600 bp, Chicken  19866894565370_1
tgtcttcattcattcataatgtacatttgctctgtcaattttccattactgtaaaaaaaaataagatgtgatactcacctttctttggtggtcaataaccagaagtcaatggaggttctatgcattaagctgagtggatagcttgtacgaataatcacctgcagataccatcaaatcacaaagacacagtagaattttacaaggggaagaaagtaataaataaataaatggatatttttatctagtttatttcatagatggagaagtatttatttacagtgcacaactctgctatcacakctacaagcttgtagcagtgattgtgaatgaggcttaggatttctgatttaaatcatatgggccaatccaattgttatttttcattcaaaaaactcctatgctgttacacaaagaaatagaaatcatggtacggagaaatataacaaatctgctctttgagtatggtgggaatcactgaagaggactttgccaggtagggactctgtactggtgtaagccagagttttaggtaatctcaaaaggcagcaggataatggggagggatgggagaagaaacttcttttttgcttggagttggaa

SEQ ID NO: 95100 - DNA, 600 bp, Chicken  19866894565381_1
tgagcagatacttgccttgagaaatacatcattttacaggatctcattttggaataggcatagtactgctgaggttgtgtgataaaatgttttaaatggataatgggtaacacagacttgtaaaattgcccctgaaaaaatgttattttttcaagtccattcagcagagaaatattggatgtaaagacagctggttctctgacctcagtttaacaaagacgagaaaaagccaagtgggagagttgcaccgtcgctacagttctcaaagtgatgtagttccttctttgtttcccatgctgwgattcaaaggtgagcgcagaggaaagcagtgcagagggaaggaagtgatgataagaacatgcacagatgagctgagaagtagcttgagtgtttcttcattaattgatagaccagtgtaatrtgaagatgaaataacgaaggtatcctagcaacaatattttcataacaaccatggcctgtaacacagtgatgaatgccagccacattttattaattcaagaggatgagggcagataattttaattaataaaacctaatggcaaactccaaatgcagaaatgtgatgagccctacacaatg

SEQ ID NO: 95101 - DNA, 600 bp, Chicken  19866894565381_2
aaaattgcccctgaaaaaatgttattttttcaagtccattcagcagagaaatattggatgtaaagacagctggttctctgacctcagtttaacaaagacgagaaaaagccaagtgggagagttgcaccgtcgctacagttctcaaagtgatgtagttccttctttgtttcccatgctgwgattcaaaggtgagcgcagaggaaagcagtgcagagggaaggaagtgatgataagaacatgcacagatgagctgagaagtagcttgagtgtttcttcattaattgatagaccagtgtaatrtgaagatgaaataacgaaggtatcctagcaacaatattttcataacaaccatggcctgtaacacagtgatgaatgccagccacattttattaattcaagaggatgagggcagataattttaattaataaaacctaatggcaaactccaaatgcagaaatgtgatgagccctacacaatgggtaacaaagtgatagattttcagagcttttacatttctcaaaatttgaaattgtgaattagtcacaggtattgttaagacgattcatataatgatagaatcattaaagttggaaaagact

SEQ ID NO: 95102 - DNA, 519 bp, Chicken  19866894565382_1
tatcacactcaacattcaaataacacaatattatggggagttctttcctaataatttttgagatggtcccaatagaccaacaaaagctaaacacactacagcaagccaatcctatgtacatgtcttacctgccaaaaattttgaaactccttcttcctcattgtttttatttgaataattaaaacataccaacatcctctacacttggcagactttccacattacttggtgtcaacaggttttctgttgatttcttcttctatatgtatatttggattttgagtcagagcttgagtctgrcagatcagtgtgatctacagtcagtaaaaacatctgtttatatccaaacccaccaattctatgatgtatttccagtagaataatagcrctgctgaggacagagtaccatgttcagttttattcacccatgccaaaaaaagatctcacattgaaaacactactagtagaactcaaagaatgggtagccttttgtggaagaagagactgaaaaaaaaaaaa

SEQ ID NO: 95103 - DNA, 431 bp, Chicken  19866894565382_2
aaacacactacagcaagccaatcctatgtacatgtcttacctgccaaaaattttgaaactccttcttcctcattgtttttatttgaataattaaaacataccaacatcctctacacttggcagactttccacattacttggtgtcaacaggttttctgttgatttcttcttctatatgtatatttggattttgagtcagagcttgagtctgrcagatcagtgtgatctacagtcagtaaaaacatctgtttatatccaaacccaccaattctatgatgtatttccagtagaataatagcrctgctgaggacagagtaccatgttcagttttattcacccatgccaaaaaaagatctcacattgaaaacactactagtagaactcaaagaatgggtagccttttgtggaagaagagactgaaaaaaaaaaaa

SEQ ID NO: 95104 - DNA, 599 bp, Chicken  19866894565390_1
  misc_feature (1)..(14): n is any nucleotide
nnnnnnnnnnnnnncacctatttttttgtttgttttaggacaaattatagaatatgtgaagcttttgtgaatggagaattctgaagatagaatgtatcttgcttcagcacctaaccaagagttctggacacaatgatttttagggctttcatgtctccagcaatcttttagcctcaattgatgcatatagagtaggaattgtgagaaataatgaatttcagggcctctggggttcataactgggccaaaaaggaaaaggaaggagtttcactttggaaatttggagatccctattgatgrttgattgtggaggatgcttgagtactagcaaggctacgcagataacggacatgggtgaggccactgcactgaagtgtagctgcttcagaagaactggctgctgggaacagcctgcaggaagctacatgaagtcacaggagtttcatatttgatttgaggggtggcctccttccttcatccacttctgctcagttttccctttgggtgtctaaagttccaatgaacattatgttaattgaaacctggcaaaggatgttttccaacatttcaccaccaaatggtccctcagcagttggaaa

SEQ ID NO: 95105 - DNA, 559 bp, Chicken  19866894565415_1
ataataataataaaaagcagctattgagtatcattataatcttaattcaaaatagctacaatgtctttagtccctgttctccttcttccctgtatgctgcaattcctaacagagatgtttaaaaataccttccagctggaatgaagggaacaattgaacaactcttgcccattggtgtttcctcaaaacactgagaaaatcatgacagactttcagttacaagtaggcacaacttcttcttcattttataaaacaacagtgtaaaagcaagttggattttgacttgataacacttcctcwtatagctatgttttaactacatctatttggcatgtgaaaaatgaaatgtcttcctatgcacaatatacagaagcatgtgagttgcatcttaagagtgtttttgtgttaacctacacttccgtgtctttggcacattgcaagacgacggaatataaattgatatagactgcttttgttcttgaatataatcatagattcatggaatcattaaggttggaacagaccactaagatcatctaatccaaccatcagcccatcc

SEQ ID NO: 95106 - DNA, 600 bp, Chicken  19866894565416_1
actggagcagtttcatgctaatcatctgaccctctcagctcattaaaaagcaaaactcaaggcatagagcaggcaagatgctgagtaagacagctcattactcaagtcagtggaagctgagtgaggagctggaatgaattccagagaagtgacaaagagaaggcaatttgcatgagggcagatgcacgaggcactcgcctcccttattaggagaaaattcttatcactcaaagaaaagggattgcaggaaatacagtagtcagtctgcagtagtctgagacagttctctgttctcacgtrgggaagagttgctttcatcagttacacgttatgaaggcctttgtgcagtgtcacgtgtggcaggatggccaaagaggatgaaagttgcttctattatggctcctgatactttcataagtagtctgtcatttttatgcatttctttttacttcaaagactttggatccaagacccagttattggaggcagatcttcaaatccatgcctgaagtaaggaacacgtgccctaagcatggggagctggaaattcagaaatggaataaggagaaggctgtgtgctgagaagatgggctgaagaaa

SEQ ID NO: 95107 - DNA, 545 bp, Chicken  19866894565424_1
tgcttatataaagcaactataaaaatgcccggacttcaacttctacctttgcaattcacatacagattacatgcagtttttattcaaattgtatctaccagaaacagaagtagaaagacatgatgcaaagtttttgagattaagacacgtgcagatgaatggcaagtaaacgaactggttttgacactatttatatttggaaactatctttggttcagtttaattgcccaagcataagcacataccagcaaccactccccagaactgttaatttcctatagggacaatgggttagctccytatggatgtcttcagtgcctcagagagtcttaaatggtgatagatgttttcacaagaaatctgaatcaaacccctgtgtttgaaatgcagcaggcagcaggggaagagcaaaggaagttgaagaaaaaagaaagtcagaaagagctggtagccaaagactgttcatagttaactttatgctgaaaacctgcttaggcttcctgcattttaactagtgttcttgccctctgggttattaaatgtct

SEQ ID NO: 95108 - DNA, 600 bp, Chicken  19866894565432_1
cgttcccacagaatataatttcacagccctaagccctttgcctctcattcagtcctctcttgcagtgggaagagactcgtgatacaacaacagatgctgccacgttgatttttggagtgatttaaaaaaaattagtaatgaagacaatccctcagtatcaccattggtgggagaaatccatatactcagtaactcatcagatcacacaggtgtttttgggaaaagtctgtggggctgggagctgcagtgtgttaatggagggtacaacactggaagcctgggtgtgttcatagttcctgygctgtgactgagtgatgcctcctgctttgggagggtcatgttctttgggagagagttacacagttacgtgcattgatagcagctgcacgttgcactccatgtgaggagtgaagctcctttgttacagaaaggaaaaaagaaaaaaaaaaacacttcagaaatactggagagaattctgcaagtcctgcacgctttgttcctgagcctgagaaacccagtgcgttgctacaggttttaataaactcagtgtttattcagaaagaggcataaatccactgccactcaaaattaacctaatcc

SEQ ID NO: 95109 - DNA, 600 bp, Chicken  19866894565432_2
aagacaatccctcagtatcaccattggtgggagaaatccatatactcagtaactcatcagatcacacaggtgtttttgggaaaagtctgtggggctgggagctgcagtgtgttaatggagggtacaacactggaagcctgggtgtgttcatagttcctgygctgtgactgagtgatgcctcctgctttgggagggtcatgttctttgggagagagttacacagttacgtgcattgatagcagctgcacgttgcactccatgtgaggagtgaagctcctttgttacagaaaggaaaaaagyaaaaaaaaaacacttcagaaatactggagagaattctgcaagtcctgcacgctttgttcctgagcctgagaaacccagtgcgttgctacaggttttaataaactcagtgtttattcagaaagaggcataaatccactgccactcaaaattaacctaatccttgacacagactcagagttgagtcttggttatcttacacttctggaaatctctcacgtacgagttggcacgtacattaccccatccacacaatattaactgtactcctgccatcacagggtgttgaactatctctgcatt

SEQ ID NO: 95110 - DNA, 600 bp, Chicken  19866894565434_1
tacagttgtaagagggcagcaattacaaagatgattaaaataacattttacatgaagttctgctaaacagaactttccccattactaaaaaacaaaacaaaaataaataaaatagggctttttgtagcttcttagagttaaaacactatttcaaaaatcatagaaatcaggagagtctggaacagactaattccaactccagtgcaactaggtgcctggttaaagatagtatactctgtacacatttttacacatcattgtaaggcaatattgatacctgaggatatgatggaagtcagragtgaattaatctttccagaatattggagcagctaattatcaataaaagcataagttctactttctggagaagataccagtcaaatgtagtcatctacagatggatttttataacactttatttttgctgtgtctatactcaatagaaattaataagtttggggtcatttttacttcactgacctatgacagatttttctgaaaactgttattaattatatttattgcttataatgttattgctacatgtattgttatcatacatagtgcatctatttatagaagggtgctccatttatg

SEQ ID NO: 95111 - DNA, 493 bp, Chicken  19866894565434_2
tgtattgttatcatacatagtgcatctatttatagaagggtgctccatttatgatccaagtttacttcatcatcttatcttgtactgatagcaaactccttaattacatagatatacacatatctacacatgaatgtaaattaccaacagtttttgtttagctttctctttaaaagtataagtgaacagccccataacctctaggagaagattgatttaagaaacctgctctgatagagaataaaggtgggggtttgttcttaaggatgctatgaagtcttatttctaaaacactgaacyaraactacatgttcatgtgccacttttccagctacactggaacctcaatgaaactgatgatagaaaattcagaacaaatttgtcaaggcatattttaaactaacagacagacctagctagcgagataatataaatattgtacttattccagattattttggtgatacatatagttctcacagatcctaagaaa

SEQ ID NO: 95112 - DNA, 491 bp, Chicken  19866894565434_3
tattgttatcatacatagtgcatctatttatagaagggtgctccatttatgatccaagtttacttcatcatcttatcttgtactgatagcaaactccttaattacatagatatacacatatctacacatgaatgtaaattaccaacagtttttgtttagctttctctttaaaagtataagtgaacagccccataacctctaggagaagattgatttaagaaacctgctctgatagagaataaaggtgggggtttgttcttaaggatgctatgaagtcttatttctaaaacactgaacyaraactacatgttcatgtgccacttttccagctacactggaacctcaatgaaactgatgatagaaaattcagaacaaatttgtcaaggcatattttaaactaacagacagacctagctagcgagataatataaatattgtacttattccagattattttggtgatacatatagttctcacagatcctaagaaa

SEQ ID NO: 95113 - DNA, 599 bp, Chicken  19866894565446_1
  misc_feature (1)..(52): n is any nucleotide
nnnnnnnnnnnnnnnnnnnnnnnnnnnnnnnnnnnnnnnnnnnnnnnnnnnncaggatccttcgtcttggtggagggaaagttactttactgttatcattactttcagcgttatgctgtggctcttcttttcgttgtggagtggtaaccagtgaccccaaattgagctgttttgatgcagacacctctgtaatgcattgcctgtgtcagcagctctgtcttctgtttcatttaaaaaacagagaacaacggaaagaacagaaaagcacaacttttttccccaccccccacctttaaaacyctccgtaacaatgcaacccagcgatggccacagcagcttctccagcttcctgccattgttcctggagctttcctcttatggccatcaccaggccgagcatttcccagccagagccttcgggatcatccctgctggtcagagggagccctgttgttctggaacagagctgatgctgcagagagaaggctgtggatgctccacatcccagcacagtcacggtgctgtttgctgggtgatgtttgctgcgggctgatgcagcagtttccccagcctggctattattttacacaatgcctttc

SEQ ID NO: 95114 - DNA, 600 bp, Chicken  19866894565477_1
tggtcccaggggctgaacaaaagcccagtgaaatcaatggttaagttaattgaaatttgctatgactaaagatcagagggcctatttcaaagctgtatatcgagatataaaagtaggcagtgccttgttgttcctccctgcttcttacacacatcgtttctaagtctaaagccgggatttcttggtacagtgtagagctttgctagtttggaaattagcttcttcctgaagctagtttgaaaatgccaattgtttgtcaatgcattgcattcaataaacgtcactttctttcacagcatrtttcagggaaaggccttgattttacaaaaaaatgtgccacgactatggggagatatggaaacatccaatcacaaacaatcagatttaagagcataaaggatcttttaaaacagtarctcacatttaaaagcatattttcaaacaaaaacattgttttccatttttccttcaaaactacaataactataatataagaagtgcataggagtgttttgcagaagtgaatgtgtgggaaaaaagatacttctgtaatcctctatttgcagtcatattccaattacagcgttctctcccatgatc

SEQ ID NO: 95115 - DNA, 600 bp, Chicken  19866894565477_2
gcagtgccttgttgttcctccctgcttcttacacacatcgtttctaagtctaaagccgggatttcttggtacagtgtagagctttgctagtttggaaattagcttcttcctgaagctagtttgaaaatgccaattgtttgtcaatgcattgcattcaataaacgtcactttctttcacagcatrtttcagggaaaggccttgattttacaaaaaaatgtgccacgactatggggagatatggaaacatccaatcacaaacaatcagatttaagagcataaaggatcttttaaaacagtarctcacatttaaaagcatattttcaaacaaaaacattgttttccatttttccttcaaaactacaataactataatataagaagtgcataggagtgttttgcagaagtgaatgtgtgggaaaaaagatacttctgtaatcctctatttgcagtcatattccaattacagcgttctctcccatgatctggaatcagtcacagcttgtgacagatgaagaactgcatttcttgaygttcctttgtaataattctggctaaataagttgttcaaaacgattgcaaattaaataataataataatc

SEQ ID NO: 95116 - DNA, 600 bp, Chicken  19866894565477_3
gggagatatggaaacatccaatcacaaacaatcagatttaagagcataaaggatcttttaaaacagtarctcacatttaaaagcatattttcaaacaaaaacattgttttccatttttccttcaaaactacaataactataatataagaagtgcataggagtgttttgcagaagtgaatgtgtgggaaaaaagatacttctgtaatcctctatttgcagtcatattccaattacagcgttctctcccatgatctggaatcagtcacagcttgtgacagatgaagaactgcatttcttgaygttcctttgtaataattctggctaaataagttgttcaaaacgattgcaaattaaataataataataatctagcttagcctgtttgttttgtttctcttctgtatgtatgagggagcagtctgcagtaacatttgggatttactagagatggctgcactgtgtttaattagatttgtagccagcctagatctcacaatccaaacacgttccaatagtcaaccagaggggcctgcggatgtgcacgttgggygagccagtcactaaaaccttacctctgattttggctttcttgttgtgcca

SEQ ID NO: 95117 - DNA, 600 bp, Chicken  19866894565477_4
atctggaatcagtcacagcttgtgacagatgaagaactgcatttcttgaygttcctttgtaataattctggctaaataagttgttcaaaacgattgcaaattaaataataataataatctagcttagcctgtttgttttgtttctcttctgtatgtatgagggagcagtctgcagtaacatttgggatttactagagatggctgcactgtgtttaattagatttgtagccagcctagatctcacaatccaaacacgttccaatagtcaaccagaggggcctgcggatgtgcacgttgggygagccagtcactaaaaccttacctctgattttggctttcttgttgtgccaacatgttagtggtgtcagaatagaacggtgagatccaaatatcctgtgaaactcgccgtgtttctctgtgtttgacttgttcttaactttcgtggaaaaacacctgattaatgaagcgaattctagatcgatgctgttctgaacaagcgtgcttacagggagtgtgaagttaaattatgtgttttgttccttgtatggtgggacttgctagaagcagtgggaccttaccttgctggtgtcattctggggt

SEQ ID NO: 95118 - DNA, 560 bp, Chicken  19866894565483_1
ttttgtgtactcataatcttatatagtaaacctcacgcactatgtatgcatagatatacctaacacactcgttatattgaatgatcacacaaagggaatcagactcattactctgacaatgtatatgcatagtgtttgatacacagatgtgtttctttccttccattattctgttctcattcctttaaaagaagcgataagttcatggcatcccatagaaggcagcacatttctttgggaaatgcagcagtctcagttactgcaggacagaggctgaaaaaacagcgagagaaaagcatrcccagatcctgcagatcaaagagagcccaaatgattgctaagagcagcaaagggctacaaggagactaagtggaaatacaaccagtaagcacatttatagtttgtgagagctcagaagtgaatagctgactgaaaacaaagattgtcctgtggtcatagggagaagacagtcactggattataaacctcgtatctccactctgctacatcagaccactttgaaatctctgaagcttttattaactattccagttcatagt

SEQ ID NO: 95119 - DNA, 600 bp, Chicken  19866894565492_1
aaaaatatccagccacctccagcacattaaaccttcgtaaacaaaccaaaccaaaaaaaatcatgaagaggaaaaataaggtgcggggtcacaaacagtggtgggggaagggagatcttttcagaagtagatgaatacaatgttgaaaaaaggcccaaatcttccatatagacaacgtatttagtggttccctgcacaactaatctgttgttacttattcttttttgctcagtatagatggaccctgtgtagcagtgaacaggctttggagaacagccttcattctgttcagcacaatayagccctctaaagtctccgctgccacttgaactatcacgttgtatacaggcgatagaaggacaattttgaaatgaataaagcaaataactggttttagtcccattaggatacaacgctgcatccctgctaagggccggtgcaactttgtatgtagtattttccactcttggagatttcttagtttttcgtaagagagacagttgctagcacagggagcatacccctagctggatgttgggtgaaggctggggatgaaggcacaaagtgtctgcttaacacagctcattagcacccaccgca

SEQ ID NO: 95120 - DNA, 600 bp, Chicken  19866894565496_1
tcccttggttttaatatttattttaaattaatttcaaaaccacagagtgattactgggccagatctacagagaagtagccatctttgttgattaaagagttgctgtttgatcaaaaatattcataatgattacgatcaagatagcagctttaattcctcaaatacctcgtaggcagcaggatctttgagcctgtggcaaaaatatacactgtacaaagaattgttttatcttctctgacttcctattgcctcagggatatgatgcagcagttgtttcaactgagtatgagttacgcattrctatgctgtagagaggttttatttggaattttcccaggatatgtgttgatggtattttttcatttgtataaaaagcttcagtactctgagaagcacattgatcttgcctcagttgtcagttgggaagagagcatcctgttccctctttttgtggcattgtctcttagctgacaagatatctgcatctattgtactcctttcttgttctcctttcactctgattgtcatgtcaatatgtgcaggtgctaatctatacacttggggacaatacattaatgaaagaagaattgtctatatccc

SEQ ID NO: 95121 - DNA, 599 bp, Chicken  19866894565505_1
  misc_feature (1)..(182): n is any nucleotide
nnnnnnnnnnnnnnnnnnnnnnnnnnnnnnnnnnnnnnnnnnnnnnnnnnnnnnnnnnnnnnnnnnnnnnnnnnnnnnnnnnnnnnnnnnnnnnnnnnnnnnnnnnnnnnnnnnnnnnnnnnnnnnnnnnnnnnnnnnnnnnnnnnnnnnnnnnnnnnnnnnnnnnnnnnnnnnnnnnnnnnaccctgctgtccgtggcctaccttccacagcccccgtgggctcccgactgcacggccgagtccggctcccatagcagagccacggggctgctgtgccatcagcacacgcagtgccacrgccccgctgcgtcctcgctccctttccctgctgcccatcaggactccagatcacgggagagccgcagcagctccttctggctgtcgatggctctcaggtgctgcagatatgcccaggtggagacggggctccgcacgctcagcgactgctccgagcctgcagggtgagggatgggctcagtgaggacccccccctcctcaatgctcacatctccatctctgcctgcagtctgacctacagctcctcctccatccccccaactgggtttgtgggtcctcctggaaacgccaaggaaccaa

SEQ ID NO: 95122 - DNA, 600 bp, Chicken  19866894565505_2
ctacagctcctcctccatccccccaactgggtttgtgggtcctcctggaaacgccaaggaaccaacagcaccatcccagcattcacagccctccaccattaaagaacaacaggcacaccagtggaccccccttaatacacttaatgagcgaaccccattaagagcctggggtcacccagccccacacctacatgtgctgatcctgatggccctggcatcctctggtcggtgtggggagcgattccgcagcggggacagcggagctgggggcatacagaaagcaggagctgagtgatgggycccccagccccrcgacgcccccagccccactccctgccccactcaccgtgtgcctggccccggcagcgctgcaggatgcgcaccgtcttcgccatcatgtgctgtgggcaatgcacaaaggagactttgctgccacccagcaccattttgctcccggctgggaaaacatcatcccctgcagcctcagcagaagctgctccgtgccctccccacccctccccacccccaccgtcgggcacggctgatgctgagtggatgctctgggccaagcagtgcccccaaagggtgggccgaggggag

SEQ ID NO: 95123 - DNA, 600 bp, Chicken  19866894565505_3
ctccatccccccaactgggtttgtgggtcctcctggaaacgccaaggaaccaacagcaccatcccagcattcacagccctccaccattaaagaacaacaggcacaccagtggaccccccttaatacacttaatgagcgaaccccattaagagcctggggtcacccagccccacacctacatgtgctgatcctgatggccctggcatcctctggtcggtgtggggagcgattccgcagcggggacagcggagctgggggcatacagaaagcaggagctgagtgatgggycccccagccccrcgacgcccccagccccactccctgccccactcaccgtgtgcctggccccggcagcgctgcaggatgcgcaccgtcttcgccatcatgtgctgtgggcaatgcacaaaggagactttgctgccacccagcaccattttgctcccggctgggaaaacatcatcccctgcagcctcagcagaagctgctccgtgccctccccacccctccccacccccaccgtcgggcacggctgatgctgagtggatgctctgggccaagcagtgcccccaaagggtgggccgaggggagcagccccccacc

SEQ ID NO: 95124 - DNA, 599 bp, Chicken  19866894565519_1
  misc_feature (1)..(207): n is any nucleotide
nnnnnnnnnnnnnnnnnnnnnnnnnnnnnnnnnnnnnnnnnnnnnnnnnnnnnnnnnnnnnnnnnnnnnnnnnnnnnnnnnnnnnnnnnnnnnnnnnnnnnnnnnnnnnnnnnnnnnnnnnnnnnnnnnnnnnnnnnnnnnnnnnnnnnnnnnnnnnnnnnnnnnnnnnnnnnnnnnnnnnnnnnnnnnnnnnnnnnnnnnnnnnnnttgagtccctgtcatttgattaaaagttacttaacctttaaattgctacagatgtaaagataactctgagtttccaatataatcgcctccaasttaaaatcaggaaaatctttgtgtaatgaaacccatatgtcatagtgaaaggatgcaaagcactggcagagtgggctgctctcgcaggagatctgcacccaatcttgttaaccaagactgcttttggtaatccctcatctcctcacttgtaggaaatcaatctgtactactgaatcttttcaaccagcaaccacaaaatttactgcgaagaagcagcttgggggcagttgtagtagaaaaggagccccaggcaacaaggctaaatgcgggattgaaggattgaagttctaaagaggaga

SEQ ID NO: 95125 - DNA, 600 bp, Chicken  19866894565519_2
gcagagtgggctgctctcgcaggagatctgcacccaatcttgttaaccaagactgcttttggtaatccctcatctcctcacttgtaggaaatcaatctgtactactgaatcttttcaaccagcaaccacaaaatttactgcgaagaagcagcttgggggcagttgtagtagaaaaggagccccaggcaacaaggctaaatgcgggattgaaggattgaagttctaaagaggagattatattaaaccttattctgttcccctatcaagtagaaatcgctcctcctttcagcctcagacttyactgtccaatacctgttcctgagatctgcttctccccagcagcaaacttaactcatatggcacagacagtgttctctattaattgtaacagcctgaaaccattttacartagttatctttttgagagtcaattcaagcactcaaattccattgtagccagtgctgataacatcttagcattttttttctatggtcttcagtgccctcttcttcctccctactatgtgagattaatttgtatccaagctattgcgatcatatccattggttgatttttctattgtagtaggtgcactgcta

SEQ ID NO: 95126 - DNA, 600 bp, Chicken  19866894565519_3
tcttttcaaccagcaaccacaaaatttactgcgaagaagcagcttgggggcagttgtagtagaaaaggagccccaggcaacaaggctaaatgcgggattgaaggattgaagttctaaagaggagattatattaaaccttattctgttcccctatcaagtagaaatcgctcctcctttcagcctcagacttyactgtccaatacctgttcctgagatctgcttctccccagcagcaaacttaactcatatggcacagacagtgttctctattaattgtaacagcctgaaaccattttacartagttatctttttgagagtcaattcaagcactcaaattccattgtagccagtgctgataacatcttagcattttttttctatggtcttcagtgccctcttcttcctccctactatgtgagattaatttgtatccaagctattgcgatcatatccattggttgatttttctattgtagtaggtgcactgctaaggcaaggctgtaaattgtctcttgacatggagattcatgattctgctttatgctgcacagcctctgtagtggctgtctgctggtgcaatgaaacctgtgctcaagccc

SEQ ID NO: 95127 - DNA, 600 bp, Chicken  19866894565534_1
cattaggtgcagctgagatatttctcattcccaggtgagcgaggtaatagctggaaatttgcactgtgatttttctgtatagatatattctgtattcccataaaagctgagtggaaggatagcacatgtgaacaaattccaaagcaggatttttgttcacttaaaaaatgtaccctaaatcatctgttatttttactcttattttcaaatgcgggtttgttgaaaacaacaaaaacaatagcatttgaggagaaacattaaaatgtaagtaattttaaaaggattttgtgcataaacttrattcacattttctgccctcagatttggcttcctgcaaacagtgaggctgtgctagtagaagcatgctttcaacaaaagttcaaagtccataagattgtctaattatcagaacttatggagygactataagaaactaamtaaataaatakggggaaaactagctaacatgaaaacattggagcaygagcatatagctaggccaaaattgcctaatccaaccttatttggtctaagcaaggctagcatagccatgcttagtaacaactaagatatatttcagttaaaacaagatggagaggg

SEQ ID NO: 95128 - DNA, 600 bp, Chicken  19866894565534_2
gcacatgtgaacaaattccaaagcaggatttttgttcacttaaaaaatgtaccctaaatcatctgttatttttactcttattttcaaatgcgggtttgttgaaaacaacaaaaacaatagcatttgaggagaaacattaaaatgtaagtaattttaaaaggattttgtgcataaacttrattcacattttctgccctcagatttggcttcctgcaaacagtgaggctgtgctagtagaagcatgctttcaacaaaagttcaaagtccataagattgtctaattatcagaacttatggagygactataagaaactaamtaaataaatakggggaaaactagctaacatgaaaacattggagcaygagcatatagctaggccaaaattgcctaatccaaccttatttggtctaagcaaggctagcatagccatgcttagtaacaactaagatatatttcagttaaaacaagatggagagggtaaaacacggagaaagctttcctgaagactcaccgtctctgttgcaagcccaagaggaaactcctggcttggtaagtaccaagctcaagctccctgtaaggctatacaacttcaagcttta

SEQ ID NO: 95129 - DNA, 600 bp, Chicken  19866894565534_3
ccaaagcaggatttttgttcacttaaaaaatgtaccctaaatcatctgttatttttactcttattttcaaatgcgggtttgttgaaaacaacaaaaacaatagcatttgaggagaaacattaaaatgtaagtaattttaaaaggattttgtgcataaacttrattcacattttctgccctcagatttggcttcctgcaaacagtgaggctgtgctagtagaagcatgctttcaacaaaagttcaaagtccataagattgtctaattatcagaacttatggagygactataagaaactaamtaaataaatakggggaaaactagctaacatgaaaacattggagcaygagcatatagctaggccaaaattgcctaatccaaccttatttggtctaagcaaggctagcatagccatgcttagtaacaactaagatatatttcagttaaaacaagatggagagggtaaaacacggagaaagctttcctgaagactcaccgtctctgttgcaagcccaagaggaaactcctggcttggtaagtaccaagctcaagctccctgtaaggctatacaacttcaagctttaaaaatgcaagcttcaag

SEQ ID NO: 95130 - DNA, 600 bp, Chicken  19866894565534_4
tttttgttcacttaaaaaatgtaccctaaatcatctgttatttttactcttattttcaaatgcgggtttgttgaaaacaacaaaaacaatagcatttgaggagaaacattaaaatgtaagtaattttaaaaggattttgtgcataaacttrattcacattttctgccctcagatttggcttcctgcaaacagtgaggctgtgctagtagaagcatgctttcaacaaaagttcaaagtccataagattgtctaattatcagaacttatggagygactataagaaactaamtaaataaatakggggaaaactagctaacatgaaaacattggagcaygagcatatagctaggccaaaattgcctaatccaaccttatttggtctaagcaaggctagcatagccatgcttagtaacaactaagatatatttcagttaaaacaagatggagagggtaaaacacggagaaagctttcctgaagactcaccgtctctgttgcaagcccaagaggaaactcctggcttggtaagtaccaagctcaagctccctgtaaggctatacaacttcaagctttaaaaatgcaagcttcaagggtccttgggc

SEQ ID NO: 95131 - DNA, 600 bp, Chicken  19866894565534_5
tgttatttttactcttattttcaaatgcgggtttgttgaaaacaacaaaaacaatagcatttgaggagaaacattaaaatgtaagtaattttaaaaggattttgtgcataaacttrattcacattttctgccctcagatttggcttcctgcaaacagtgaggctgtgctagtagaagcatgctttcaacaaaagttcaaagtccataagattgtctaattatcagaacttatggagygactataagaaactaamtaaataaatakggggaaaactagctaacatgaaaacattggagcaygagcatatagctaggccaaaattgcctaatccaaccttatttggtctaagcaaggctagcatagccatgcttagtaacaactaagatatatttcagttaaaacaagatggagagggtaaaacacggagaaagctttcctgaagactcaccgtctctgttgcaagcccaagaggaaactcctggcttggtaagtaccaagctcaagctccctgtaaggctatacaacttcaagctttaaaaatgcaagcttcaagggtccttgggcataattacaccgttataattagattaaaaacaaac

SEQ ID NO: 95132 - DNA, 599 bp, Chicken  19866894565536_1
  misc_feature (1)..(75): n is any nucleotide
nnnnnnnnnnnnnnnnnnnnnnnnnnnnnnnnnnnnnnnnnnnnnnnnnnnnnnnnnnnnnnnnnnnnnnnnnnngttaggatcatttagagaggaaatgaaaaagaaaagggtatggtagagctatccaaactagttaatagaactgaggagataaatcagatcacagaatcacagaatcacagatgctcttcctcaccatttttcctacacaaaatgcaagagaacactcggtaaaactgagatagcaaattaaaactgataaaatcaattacacaacatatatttagcatatgaaastcattattctggggtatcactgacatcagaaagatggagagcatcaaagaggtacagaaacttctgtggaatggaaatacctgtgaggattttaactacaagtaaataaatagaaaaatataagttgttctgtactgggtcggggaacttgtaaaatcttcctcttgtttaccaagcctttttgatacatctggatacaggttggtggccctgattatgaactgacaatcatgyggagtgaaaggaagctgtctcaggaggatggagaagagagggacatgctggtgccctcctcttca

SEQ ID NO: 95133 - DNA, 600 bp, Chicken  19866894565536_2
taaaactgagatagcaaattaaaactgataaaatcaattacacaacatatatttagcatatgaaastcattattctggggtatcactgacatcagaaagatggagagcatcaaagaggtacagaaacttctgtggaatggaaatacctgtgaggattttaactacaagtaaataaatagaaaaatataagttgttctgtactgggtcggggaacttgtaaaatcttcctcttgtttaccaagcctttttgatacatctggatacaggttggtggccctgattatgaactgacaatcatgyggagtgaaaggaagctgtctcaggaggatggagaagagagggacatgctggtgccctcctcttcacgtcagtactatgagtgcagccatctgcacctctcaaaactgcttgaaacagcaggattttggtgggctgttgagtttggcacaagcaaagggtagcataatggggcaacaaggacagcacctaactgtgtggcaaatccttgtcagcaattctctgcctaaagatcccaagatctattggtccatagatgcccctgctgtggatgcacatatatagggcccttaggacaaaatc

SEQ ID NO: 95134 - DNA, 600 bp, Chicken  19866894565544_1
caacaggcagagcctcactacagctgcctgtgcgtgctggtttgccaactcctgggtaagggctctggtgcaaataggaattgtggatagccttaatatgcttttaaacataggttctcagaaactggactttatttgcagtaagtttattttgttgattaccattccccacaagcagaagatgcaattgatttctttttttacggtcaagggaaaataaacataataagcaattgatcgggaggcagaaggtagatcttctgggaaggaaacaacatccagaggtgaagtaagacaccrctgctactttgaggcaatatatctggtttcctcatgtattaattgcagaaaaagtagatcctctctatgttgccaggaaaggtttcctgcctgttctgtccctccttcctttccctgccctaactggagtgcctgcagcatccaggcaagtaacatgggactgactgctctgactgcaagtgcccttgatcaactctcccatggctttgcaatgtcatggaggcttctacctgaagagatctgatggcatgaaggcagctcatgcatgaaattccagcagtgtgagatgagctgtttgac

SEQ ID NO: 95135 - DNA, 599 bp, Chicken  19866894565572_1
  misc_feature (1)..(146): n is any nucleotide
nnnnnnnnnnnnnnnnnnnnnnnnnnnnnnnnnnnnnnnnnnnnnnnnnnnnnnnnnnnnnnnnnnnnnnnnnnnnnnnnnnnnnnnnnnnnnnnnnnnnnnnnnnnnnnnnnnnnnnnnnnnnnnnnnnnnnnnnnnnnnnnnnnatttactaatggttttgatgctatctcccttatggagatatttgctcatggtggaaatggggaaacatattggtactctgtagcagcatcttttaggctgatgacttaggcatgaatgatttccaaaatagaaattcagtaatgtcagaactgmatgtacatgaaagctctcttaaaccacagcctactgcttgaatgtttcagtgaagaatataactcatattttctatagaagccttgaaaactaactaggatgtgactagctatcctttgtatgccctttattccagactccatcacagatatataacaaaggttcacaggaccagggtgggattccctgacttgtttccttttagctatcattctaatgatgacagaagcagatgtcttctcagtgtatccaactgaaaaccaggagggaagatgaagaaaggcgacaagccatttgtg

SEQ ID NO: 95136 - DNA, 572 bp, Chicken  19866894565573_1
gccctggtcctcatgcttgtgcctgtgcctcacagcagtcttctgatttgcatggaagctgcgtggttccctcctcatcaggacaaaatgccctgaggtctatcagaacatcactctgcctattctggtgatcacccaactggcaccagcactcactgctgcttccatttttccatcatctttctgaagtgcagcctccagaattgggatgcaattcaagtaatggccccaatactgctgtatatcttcttggtaatctcctgctttgccaagcctcccaacagctctctgtccccatgyrtcccacagggagctcgtggtcgcacacgacccaggaggccacctaaatcctttgcacaacccctcatctccccatcagtccccagctaggsaagctatagtcacgtggagtcacatttctaagtctggttagcacatttatctctgttctgttctctggtgcctgctctgtacaaaagggtttcaatattggtgtaaaaagtgatgtttagacttgttctgacacacttcagatttgctttacctcctttcctccttttccccacacatcc

SEQ ID NO: 95137 - DNA, 571 bp, Chicken  19866894565573_2
ccctggtcctcatgcttgtgcctgtgcctcacagcagtcttctgatttgcatggaagctgcgtggttccctcctcatcaggacaaaatgccctgaggtctatcagaacatcactctgcctattctggtgatcacccaactggcaccagcactcactgctgcttccatttttccatcatctttctgaagtgcagcctccagaattgggatgcaattcaagtaatggccccaatactgctgtatatcttcttggtaatctcctgctttgccaagcctcccaacagctctctgtccccatgyrtcccacagggagctcgtggtcgcacacgacccaggaggccacctaaatcctttgcacaacccctcatctccccatcagtccccagctaggsaagctatagtcacgtggagtcacatttctaagtctggttagcacatttatctctgttctgttctctggtgcctgctctgtacaaaagggtttcaatattggtgtaaaaagtgatgtttagacttgttctgacacacttcagatttgctttacctcctttcctccttttccccacacatcc

SEQ ID NO: 95138 - DNA, 480 bp, Chicken  19866894565573_3
ctgaggtctatcagaacatcactctgcctattctggtgatcacccaactggcaccagcactcactgctgcttccatttttccatcatctttctgaagtgcagcctccagaattgggatgcaattcaagtaatggccccaatactgctgtatatcttcttggtaatctcctgctttgccaagcctcccaacagctctctgtccccatgyrtcccacagggagctcgtggtcgcacacgacccaggaggccacctaaatcctttgcacaacccctcatctccccatcagtccccagctaggsaagctatagtcacgtggagtcacatttctaagtctggttagcacatttatctctgttctgttctctggtgcctgctctgtacaaaagggtttcaatattggtgtaaaaagtgatgtttagacttgttctgacacacttcagatttgctttacctcctttcctccttttccccacacatcc

SEQ ID NO: 95139 - DNA, 600 bp, Chicken  19866894565582_1
taaaataataaatatgattaattaacagcatcaacaccagctacatatttgcattattggaagagctagtgtatgcataacctcagtacattggatcagtaagtaatagtacaccttaccttagctatccagagaaaaaggtgaaatgaattggacttacagtgcctgccatgtctgcatctgaagtaaaaagaaaaataaaatttccagatgaagaactgtaagattaagttcctaacagtctgaaaatctatttcaaaaattttttcaggggacttgatgaaaggttcaaagttccarttcattagctagcagtctgaggcctactctcccagctcagggtcttggttagactgaaaagattaccaaggggaagcagaacattctgcatctcaaagtgctgtgcaagcaagacttgatgcctatttctgagagatctgctctatctcaaacagaagttgagaagcagcattcaaggaaggaattactggaaggaattctctgctccatcttaggcaggagctgaaattaagtattataaacagcctcgtcagaacttaaattatggctttctggtcactatctattggtgcagggaac

SEQ ID NO: 95140 - DNA, 599 bp, Chicken  19866894565591_1
  misc_feature (1)..(162): n is any nucleotide
nnnnnnnnnnnnnnnnnnnnnnnnnnnnnnnnnnnnnnnnnnnnnnnnnnnnnnnnnnnnnnnnnnnnnnnnnnnnnnnnnnnnnnnnnnnnnnnnnnnnnnnnnnnnnnnnnnnnnnnnnnnnnnnnnnnnnnnnnnnnnnnnnnnnnnnnnnnnnnnnnntgctctgatggtgctcatagcccagaagtttgacagagattgttttccttcatatgaaaatttgaattgctcacaagtatcataacagacacaagagtacagctcaagccagagctcaacacagttcttagcagcagmaattatgcaggaatgacataaaagtctgtgagaaagcacagctggggtgaagaggatagagcagagattatgaaatggaacgagtcagggagcatgtggggaatgacttggcaaaaaaggcctaacatgctgaatcaaatggcaagtccattacctgcacagttaacacaggatcaaatkaatcatttagaagcatatgaagtgtatgagtttgaaaagcaaaattttggrtacagcaagcatgtttttggagatgcagagctgtgcatgttcagcagaataaggcttgagcacaagtg

SEQ ID NO: 95141 - DNA, 600 bp, Chicken  19866894565591_2
agcccagaagtttgacagagattgttttccttcatatgaaaatttgaattgctcacaagtatcataacagacacaagagtacagctcaagccagagctcaacacagttcttagcagcagmaattatgcaggaatgacataaaagtctgtgagaaagcacagctggggtgaagaggatagagcagagattatgaaatggaacgagtcagggagcatgtggggaatgacttggcaaaaaaggcctaacatgctgaatcaaatggcaagtccattacctgcacagttaacacaggatcaaatkaatcatttagaagcatatgaagtgtatgagtttgaaaagcaaaattttggrtacagcaagcatgtttttggagatgcagagctgtgcatgttcagcagaataaggcttgagcacaagtgaaaaattttttgaaagtcagttaatattacagggttattattcttaaatatagttttccatagcaraactagatttggttaactcttcaaacccccattctaaatgattctctgtggttcctgataacaacgcaatgatgacaatgtactactgaatgaagacatcaatgtgaagagaacc

SEQ ID NO: 95142 - DNA, 600 bp, Chicken  19866894565591_3
ctcacaagtatcataacagacacaagagtacagctcaagccagagctcaacacagttcttagcagcagmaattatgcaggaatgacataaaagtctgtgagaaagcacagctggggtgaagaggatagagcagagattatgaaatggaacgagtcagggagcatgtggggaatgacttggcaaaaaaggcctaacatgctgaatcaaatggcaagtccattacctgcacagttaacacaggatcaaatkaatcatttagaagcatatgaagtgtatgagtttgaaaagcaaaattttggrtacagcaagcatgtttttggagatgcagagctgtgcatgttcagcagaataaggcttgagcacaagtgaaaaattttttgaaagtcagttaatattacagggttattattcttaaatatagttttccatagcaraactagatttggttaactcttcaaacccccattctaaatgattctctgtggttcctgataacaacgcaatgatgacaatgtactactgaatgaagacatcaatgtgaagagaacccaaaaagggaagaataatcatgatacttttcttctgaaataaacagaaata

SEQ ID NO: 95143 - DNA, 600 bp, Chicken  19866894565591_4
gattatgaaatggaacgagtcagggagcatgtggggaatgacttggcaaaaaaggcctaacatgctgaatcaaatggcaagtccattacctgcacagttaacacaggatcaaatkaatcatttagaagcatatgaagtgtatgagtttgaaaagcaaaattttggrtacagcaagcatgtttttggagatgcagagctgtgcatgttcagcagaataaggcttgagcacaagtgaaaaattttttgaaagtcagttaatattacagggttattattcttaaatatagttttccatagcaraactagatttggttaactcttcaaacccccattctaaatgattctctgtggttcctgataacaacgcaatgatgacaatgtactactgaatgaagacatcaatgtgaagagaacccaaaaagggaagaataatcatgatacttttcttctgaaataaacagaaatataagtagatataaagcagtccatggaatactaataacttttctgcaacatttctgtgaattacatattttttaatgtgtagaatagggaagactagatgtatatgaaattttgagtatttgcatttagtttcag

SEQ ID NO: 95144 - DNA, 599 bp, Chicken  19866894565595_1
  misc_feature (1)..(217): n is any nucleotide
nnnnnnnnnnnnnnnnnnnnnnnnnnnnnnnnnnnnnnnnnnnnnnnnnnnnnnnnnnnnnnnnnnnnnnnnnnnnnnnnnnnnnnnnnnnnnnnnnnnnnnnnnnnnnnnnnnnnnnnnnnnnnnnnnnnnnnnnnnnnnnnnnnnnnnnnnnnnnnnnnnnnnnnnnnnnnnnnnnnnnnnnnnnnnnnnnnnnnnnnnnnnnnnnnnnnnnnnnctgccaggataacaaaaatctgtgagctgagcagtgttactgctacgtgtggatcagcactgaactgggcagagctctggctstttgcagaggtgtggagagtygatcatgccagctgaatacgtggtccactgcatcccttcttctagtgtggagaaaaatagctgaatgaatggagatgtgcaggtgatctgtagttcagggacttgctctctgtcttgtgtgtatttttggcatgttttgttttgtttttttattggtaagctccggagggatttggatggttgactctccccagcctggtggccttggcaagaaggctttagtttctcagcgctgagtaagataactgtgcaagctcaagtgtctcagccagcttgga

SEQ ID NO: 95145 - DNA, 599 bp, Chicken  19866894565595_2
  misc_feature (1)..(196): n is any nucleotide
nnnnnnnnnnnnnnnnnnnnnnnnnnnnnnnnnnnnnnnnnnnnnnnnnnnnnnnnnnnnnnnnnnnnnnnnnnnnnnnnnnnnnnnnnnnnnnnnnnnnnnnnnnnnnnnnnnnnnnnnnnnnnnnnnnnnnnnnnnnnnnnnnnnnnnnnnnnnnnnnnnnnnnnnnnnnnnnnnnnnnnnnnnnnnnnnnnnnctgccaggataacaaaaatctgtgagctgagcagtgttactgctacgtgtggatcagcactgaactgggcagagctctggctstttgcagaggtgtggagagtygatcatgccagctgaatacgtggtccactgcatcccttcttctagtgtggagaaaaatagctgaatgaatggagatgtgcaggtgatctgtagttcagggacttgctctctgtcttgtgtgtatttttggcatgttttgttttgtttttttattggtaagctccggagggatttggatggttgactctccccagcctggtggccttggcaagaaggctttagtttctcagcgctgagtaagataactgtgcaagctcaagtgtctcagccagcttggacgcagagctgatttattgctc

SEQ ID NO: 95146 - DNA, 600 bp, Chicken  19866894565595_3
tgaatgaatggagatgtgcaggtgatctgtagttcagggacttgctctctgtcttgtgtgtatttttggcatgttttgttttgtttttttattggtaagctccggagggatttggatggttgactctccccagcctggtggccttggcaagaaggctttagtttctcagcgctgagtaagataactgtgcaagctcaagtgtctcagccagcttggacgcagagctgatttattgctcaatagagccattgaggagctggaaattggatgtgatttgtactcagggccagttctggcttrcagggatgaattctgtttagagagtcacctgtgactcctgccttctgtgcccttcacttccagagcaaagataataccaaagctttcatagtgacttccccttctcacggtgggcacagctgtgtggggttcccactgctgcccccgcatctcctgcccacacaggattagccagcccaggtataatctgttcatccctattgaactgctgagagatcctgcaaagactgcttttaggcaaagaaagctctttgctaattcacaacaccaggaaaagaaaaaaaaaatgatttaaaagaa

SEQ ID NO: 95147 - DNA, 600 bp, Chicken  19866894565595_4
tgaattctgtttagagagtcacctgtgactcctgccttctgtgcccttcacttccagagcaaagataataccaaagctttcatagtgacttccccttctcacggtgggcacagctgtgtggggttcccactgctgcccccgcatctcctgcccacacaggattagccagcccaggtataatctgttcatccctattgaactgctgagagatcctgcaaagactgcttttaggcaaagaaagctctttgctaattcacaacaccaggaaaagaaaaaaaaaatgatttaaaagaaaaaaaraagaagaagaagaagaaaaaagaaactagggagaataattggccgattcctggcatcctcgatggctgctcttaagcaattatggggactcagcaacacccgtatcacagcacgttctcagagattaaccgtctgctcagctggcaattaaagctggttaaatgggaagctgccacttagtttcgactttgtagcggctgttttcacttctccaagtcaggctccaggctctgaagggaggggtgtgaatacgtgtggggaagattaagtgtgagcagcctttcgtatgttgggagagaa

SEQ ID NO: 95148 - DNA, 600 bp, Chicken  19866894565596_1
tttttgtgtgtgtgtactttgtataggctgtaatatttgctccctaacaacagcagaataagaaaatcagtgattgcggatgaatacttaatcttgcaattcctttaaaataaatgctctgacatccccgagacatagaaagtcaagcacctttcttactgtctactttcattaacccgaagagaaaaaaatgcttaatttttaatccagaggaaataattttctaatcctgttttaaacactaccatttgagaaagagaaattaaaaaaatagcccaacaaatcaatctaaataaatcraaataaaccactaagcttatrttcctttacttccctatttcatatgcatgaatctaaaaataaagctcctgttacgctagtgaagtaaatgtagactattgtctggaggcaggatgacgatctttagctataacctccaaagccctgagacctcattaccaagccacagcytctcgccctacttctttcacaacagaatgcgatgcccaggctgtcagagcagtgtttgggctcctcagcatgcagggccaatgctcacacacctttcccgtagtggtttgacctagctgaagctcatgc

SEQ ID NO: 95149 - DNA, 600 bp, Chicken  19866894565596_2
tataggctgtaatatttgctccctaacaacagcagaataagaaaatcagtgattgcggatgaatacttaatcttgcaattcctttaaaataaatgctctgacatccccgagacatagaaagtcaagcacctttcttactgtctactttcattaacccgaagagaaaaaaatgcttaatttttaatccagaggaaataattttctaatcctgttttaaacactaccatttgagaaagagaaattaaaaaaatagcccaacaaatcaatctaaataaatcraaataaaccactaagcttatrttcctttacttccctatttcatatgcatgaatctaaaaataaagctcctgttacgctagtgaagtaaatgtagactattgtctggaggcaggatgacgatctttagctataacctccaaagccctgagacctcattaccaagccacagcytctcgccctacttctttcacaacagaatgcgatgcccaggctgtcagagcagtgtttgggctcctcagcatgcagggccaatgctcacacacctttcccgtagtggtttgacctagctgaagctcatgcgtttccttggactatttgttt

SEQ ID NO: 95150 - DNA, 600 bp, Chicken  19866894565596_3
ttaacccgaagagaaaaaaatgcttaatttttaatccagaggaaataattttctaatcctgttttaaacactaccatttgagaaagagaaattaaaaaaatagcccaacaaatcaatctaaataaatcraaataaaccactaagcttatrttcctttacttccctatttcatatgcatgaatctaaaaataaagctcctgttacgctagtgaagtaaatgtagactattgtctggaggcaggatgacgatctttagctataacctccaaagccctgagacctcattaccaagccacagcytctcgccctacttctttcacaacagaatgcgatgcccaggctgtcagagcagtgtttgggctcctcagcatgcagggccaatgctcacacacctttcccgtagtggtttgacctagctgaagctcatgcgtttccttggactatttgttttactgtctttcttacactgttgttacaacctgtttctcgctcactatgaggtggagggtagatttagattggatacacaaaattcttcatggtgagagtggtaagacagtggcataggctgcccaaagacattgtggatgctccatcctt

SEQ ID NO: 95151 - DNA, 599 bp, Chicken  19866894565599_1
  misc_feature (1)..(159): n is any nucleotide
nnnnnnnnnnnnnnnnnnnnnnnnnnnnnnnnnnnnnnnnnnnnnnnnnnnnnnnnnnnnnnnnnnnnnnnnnnnnnnnnnnnnnnnnnnnnnnnnnnnnnnnnnnnnnnnnnnnnnnnnnnnnnnnnnnnnnnnnnnnnnnnnnnnnnnnnnnnnnnnactatcagtgttttatcatacaaagcagattttgaaaggacttcagtaccttttgtaaccagtggctaaattgttggaacagataggatgaacttatgttgtgtcattgctgccccatttaaaactgtgatagttgcagtrtgctcatccacttggcaacttttagttgactatttgatttttgcttagtttatttgacattcttgaccacaattctggctgccccaagaagcaaatcagtcagttgwctaggagtattaagattgcagaatcaatgccttagaagttaagtggtttgttctcttagtratgcttactattaatgtcagaaaaaccccacaagtactgtgaaagttaaagcattaaggtttttcagtcagatatgcagaactggtgaacttgtgtgattgtattggtcttcatttcagtactctagcctc

SEQ ID NO: 95152 - DNA, 599 bp, Chicken  19866894565599_2
  misc_feature (1)..(52): n is any nucleotide
nnnnnnnnnnnnnnnnnnnnnnnnnnnnnnnnnnnnnnnnnnnnnnnnnnnnactatcagtgttttatcatacaaagcagattttgaaaggacttcagtaccttttgtaaccagtggctaaattgttggaacagataggatgaacttatgttgtgtcattgctgccccatttaaaactgtgatagttgcagtrtgctcatccacttggcaacttttagttgactatttgatttttgcttagtttatttgacattcttgaccacaattctggctgccccaagaagcaaatcagtcagttgwctaggagtattaagattgcagaatcaatgccttagaagttaagtggtttgttctcttagtratgcttactattaatgtcagaaaaaccccacaagtactgtgaaagttaaagcattaaggtttttcagtcagatatgcagaactggtgaacttgtgtgattgtattggtcttcatttcagtactctagcctcactttcaaggcatttaatttgaagcattagcttatctgaaagcactgtgaactgttttttaatccactatgtcatttgggttggtatgtctcattgtagtagcacac

SEQ ID NO: 95153 - DNA, 600 bp, Chicken  19866894565599_3
gttttatcatacaaagcagattttgaaaggacttcagtaccttttgtaaccagtggctaaattgttggaacagataggatgaacttatgttgtgtcattgctgccccatttaaaactgtgatagttgcagtrtgctcatccacttggcaacttttagttgactatttgatttttgcttagtttatttgacattcttgaccacaattctggctgccccaagaagcaaatcagtcagttgwctaggagtattaagattgcagaatcaatgccttagaagttaagtggtttgttctcttagtratgcttactattaatgtcagaaaaaccccacaagtactgtgaaagttaaagcattaaggtttttcagtcagatatgcagaactggtgaacttgtgtgattgtattggtcttcatttcagtactctagcctcactttcaaggcatttaatttgaagcattagcttatctgaaagcactgtgaactgttttttaatccactatgtcatttgggttggtatgtctcattgtagtagcacacaatgtatgtggactatgcagtgttcasgggtgtgatttagcagagrgttgttagtcagggta

SEQ ID NO: 95154 - DNA, 600 bp, Chicken  19866894565599_4
atgccttagaagttaagtggtttgttctcttagtratgcttactattaatgtcagaaaaaccccacaagtactgtgaaagttaaagcattaaggtttttcagtcagatatgcagaactggtgaacttgtgtgattgtattggtcttcatttcagtactctagcctcactttcaaggcatttaatttgaagcattagcttatctgaaagcactgtgaactgttttttaatccactatgtcatttgggttggtatgtctcattgtagtagcacacaatgtatgtggactatgcagtgttcasgggtgtgatttagcagagrgttgttagtcagggtagtatggttaggttgcaggtggatttcatgatctttaaggtcttttccaaccgagcaattctatgattctgtgatctataatagaaaaacctgggtgtaattattaaccagaaagcgctgacagtaccacaagaaagtgtaaaggtggtaaatatcttagatttaaagattacataaacacagtgtttggagatgaagttcaacagataaggaatgccagataaaacagcctttgaaatcataattttgctgttactgttgttttg

SEQ ID NO: 95155 - DNA, 582 bp, Chicken  19866894565599_5
gtttgttctcttagtratgcttactattaatgtcagaaaaaccccacaagtactgtgaaagttaaagcattaaggtttttcagtcagatatgcagaactggtgaacttgtgtgattgtattggtcttcatttcagtactctagcctcactttcaaggcatttaatttgaagcattagcttatctgaaagcactgtgaactgttttttaatccactatgtcatttgggttggtatgtctcattgtagtagcacacaatgtatgtggactatgcagtgttcasgggtgtgatttagcagagrgttgttagtcagggtagtatggttaggttgcaggtggatttcatgatctttaaggtcttttccaaccgagcaattctatgattctgtgatctataatagaaaaacctgggtgtaattattaaccagaaagcgctgacagtaccacaagaaagtgtaaaggtggtaaatatcttagatttaaagattacataaacacagtgtttggagatgaagttcaacagataaggaatgccagataaaacagcctttgaaatcataattttgctgttactgttgttttga

SEQ ID NO: 95156 - DNA, 600 bp, Chicken  19866894565600_1
aggatttcatcatctgagaatgatccctttgatagtcagctaccataggattagcactcacagctcagaaagccaacaggatccttggctgtatcaaaagaagtgtggccagcagggcgagggaggtgatcctgcctgtctactccacgctgctgaggcctcacctggggtaatgcatccaggtgtggagtcctcagtacaggagagacacaaacctgttggagcacatccagagaaaggacaccaaaatgatccaagggatggaacatctctcctgtgaggacaggctgagacagctgrggcttggagaagctgacctgagagctgcctttcaatatttaaagggaagactcaggaaagaaggggacagactttagcatggtctgtgctgatagaacaagcggaaatggcttcaagctcaaagaaggtagatttaggttggatataaggaaaaaatgtttttaagtatgggtggtgaggcactggaacaggctgcctagagatatggtggataacccacttgtggagatgtttaaggtgaggctgggtcaggccctggcaacctgatctagctgtggatgtccctgttcattgtggagg

SEQ ID NO: 95157 - DNA, 600 bp, Chicken  19866894565603_1
gtcgtcttgtcaaacataagcatggcgtcctctacctgcaagacacaagggagaggcgtgcttaacacacccagctgggttggcagaggcacacaaacacagcgggatggcggaggcctcggctcaggcggtgcaggtgcatcacgtctccttcctctggctcagagtcagcatcaccccttggaaacctgctgcttccaacctgtgtgctcgctgacatctgatcctaaagcagaaaagtgaacgttagcagttctgacaccctacaaagcccaacgtccaggcggcccttccaccttkccatgccccacctcggcctctttcccttttgtagagataaaggagggccaagggaggaatcatggatgcaaatcacgcccgtgacttctccaaatcagagctgctgccttggctgagaattgggaggtttcaaggagcgggagcagggcaaaatctggtcagccaagaaaggtattcagagggtttcaaagggccctttgaaaagctggaggagagggcagagggagggggggagaaagtttaattcgcatcaggcttggcatttccacttcagaagagagatgactgatgaaacgtact

SEQ ID NO: 95158 - DNA, 599 bp, Chicken  19866894565606_1
  misc_feature (1)..(9): n is any nucleotide
nnnnnnnnnacgtgacattccttagaggggaaaaaatgacatccagctgtcgtttgagtttcttttttgctgctttatactgatatttcattgaaaaggctgtattagaaaaaaattgagttacaaatgcaacaactccaaaaatattagaattaacattttactgtgtaaccttactttatgccctttctatgcattatggtacagatattcacagcatgattatatgctgtgttatcagtatgatgcttgctttctttagtgcagaagatggataatacctgctgaatgaccagcttyagggatttgccgtgcagtttttggatcatattccagtggtttctatttaatgctgcactggagtcacaattgacaaattcctcacaggccattttgtgattcttagaactagtattataattactgagttaattttcccaccttcctggagattggtatgattctttgttttactgagagaaaagaacaggaagagagctgaagcccagataaaccccacataagcaaatatcagggataaacagttgttctggatttgccttctgaggctgcaagaaggctaagtttctttggactac

SEQ ID NO: 95159 - DNA, 600 bp, Chicken  19866894565614_1
tcaacagagatatgtctctctgaatttttgtagttttgagtaactgtgatgacaaaacttgtttatagtttaaatcaagcctcattccaaggcaaaaacacactgcaataatccaaagagaatgagaactcatgcactggatgacagagtcatcaaaggctgtgtgcgtggctgctcttttatcattttcaggcaggttctctcgtcttcataaagatcactgcagcttctagttaatgtaatgacctttacagaaaggatggaagaattgcacaaggctacagaggcactcttgccctyaaccatttggggaaagtcttgcaatagatcaaatcaacaatataaaaaataagagcaagatgatgcaaagtagtgtcagcacaataacattcaccattctttgtcctcaagactatgttaacgcaccaggtagcattttcaccaactcactgtggacaggggacagcattattctgactataagaagagaaaactagaaagagtcacaagcaggactgatgggacttttaccaagggaagtctgggggaaaaaaatgtctggatgtcctgagtccagccattttatcatcagctagagca

SEQ ID NO: 95160 - DNA, 600 bp, Chicken  19866894565619_1
gtctgtaatacattttgatactcaatttggctgcagagttgtgttgaaactgatagtagaatttggccaacttaaagtagtggcaagctgttcctttggcttgaagaaaaaggtgtcttctgcctgatggctgcgtctgctttcctgttgcacggagtagttaagaatatcttgagctgagaatatccctgagctaccaacaactgctgggagggaacaggtggccctacaggtagcttaatttgcactctccaagctgccatcacctttgcttgcaagaaaggtgactttgcaaggagrtagctttgcatctatggatgagtgagcctggtgttttgctgcatggctgcagtgagcctttgggtgagtgaatgcagccagcccaggaggggggtccttgcctaagggctgagcgatccacgtcggagctctcactcagagaagtaggtggtaccaattctgtgtagagaaagctctgcacgcgaggctgagaaacactatgaaactgagacttctcataacttttatttaatataaataacccttccacatcagcttttttttcatctgttcagtcttttctcttgccgtaacgaagaa

SEQ ID NO: 95161 - DNA, 600 bp, Chicken  19866894565622_1
tataacaggtacaagaaaaagataagacattgacacatttacatctaagtaatgattagagtatgtgctgtcaaactgcagataaggtaattatttgttagcatgcagcactgagcaattacacaaaaaaacttgcattatcccaaggcaatcattcatctatttggaaagagttgcatttttatttctttttttaaatcaaacaaatatacattgcctttgctgaattattataaagtcttgcttctttctaaccgctctgtcatggaaaaagggaaaggtcattgtaactgtagcaayagaaagcatttttgttaactagttgaaattcctaacaggacagaaaatagtgctgacttctacctctgcccctcacagcagaaacagtttctgcatgctgacacccccgttagttctcctcaaacagtttgccaggggaaataagctgatcacatttgctttgatgattacactccacaagacaaaactaccagtagattttagtttaaattacaggtgataattcagcatattttactttttcagtggtgagttcttcagagaaaattcaatattgatgtattagaaaaattcctttca

SEQ ID NO: 95162 - DNA, 599 bp, Chicken  19866894565626_1
  misc_feature (1)..(164): n is any nucleotide
nnnnnnnnnnnnnnnnnnnnnnnnnnnnnnnnnnnnnnnnnnnnnnnnnnnnnnnnnnnnnnnnnnnnnnnnnnnnnnnnnnnnnnnnnnnnnnnnnnnnnnnnnnnnnnnnnnnnnnnnnnnnnnnnnnnnnnnnnnnnnnnnnnnnnnnnnnnnnnnnnnnnatgtaatataatactggagtggaaaggctaccagaaaaagacacagtaacgctgcactggctagttctagacatgagctatacattaaaagtaagtcaaaacccccaacttaattttgtacatatgccatcccacycccagcctctctcggggtgttttaaagctgcaagggcagatttgtcttctcagaaagtatctcccttgaaggcaaagatgccgtatacagaagagcaccaacagcttcctagcatcacctaacacaaacaattgctgcaaaatccccagaagaaaagaaattctcccaaactggcataaatttcattaaaatctttctactctggtccagtctagtctatgagtatgttctacgcacatgcagaagccaaactggtcactagagattattcattacaccacattgtagttgaacccgga

SEQ ID NO: 95163 - DNA, 599 bp, Chicken  19866894565636_1
  misc_feature (1)..(101): n is any nucleotide
nnnnnnnnnnnnnnnnnnnnnnnnnnnnnnnnnnnnnnnnnnnnnnnnnnnnnnnnnnnnnnnnnnnnnnnnnnnnnnnnnnnnnnnnnnnnnnnnnnnnntaggagaagtctatctgggaacagatgttgcacttccatcaatgctcttcactgcaggaggaaaatgaggatcatacatcttctgtccaggttttaaaacagttgttttgtccaacacaaaatagatttgtgctgtgaagcatccttggaaatttccactctcaagtctttttgaaagccatttgctctacagaggtartgtccttaatctccaaggtgaactccacctgtcccagacacagcttakcactctgaagtgtaatggtgrctgcagtgctgaacagcgagcacaaagtttgctgatctctcctgccagtcaccactgaacaagtaagtcttcagatrtgccagaggtttcacatgctgagctgtaattacgttgtatctcccttyttgccctctaagagagcaaattaatggaatgtcattagaacagagtagatgctcagcaccaccctaatcctcttgctccattaatgaaatagatacttacgcttc

SEQ ID NO: 95164 - DNA, 599 bp, Chicken  19866894565636_2
  misc_feature (1)..(53): n is any nucleotide
nnnnnnnnnnnnnnnnnnnnnnnnnnnnnnnnnnnnnnnnnnnnnnnnnnnnntaggagaagtctatctgggaacagatgttgcacttccatcaatgctcttcactgcaggaggaaaatgaggatcatacatcttctgtccaggttttaaaacagttgttttgtccaacacaaaatagatttgtgctgtgaagcatccttggaaatttccactctcaagtctttttgaaagccatttgctctacagaggtartgtccttaatctccaaggtgaactccacctgtcccagacacagcttakcactctgaagtgtaatggtgrctgcagtgctgaacagcgagcacaaagtttgctgatctctcctgccagtcaccactgaacaagtaagtcttcagatrtgccagaggtttcacatgctgagctgtaattacgttgtatctcccttyttgccctctaagagagcaaattaatggaatgtcattagaacagagtagatgctcagcaccaccctaatcctcttgctccattaatgaaatagatacttacgcttcacttgcatccaaatgacgtccaggattttcttaacagccttctatttt

SEQ ID NO: 95165 - DNA, 599 bp, Chicken  19866894565636_3
  misc_feature (1)..(32): n is any nucleotide
nnnnnnnnnnnnnnnnnnnnnnnnnnnnnnnntaggagaagtctatctgggaacagatgttgcacttccatcaatgctcttcactgcaggaggaaaatgaggatcatacatcttctgtccaggttttaaaacagttgttttgtccaacacaaaatagatttgtgctgtgaagcatccttggaaatttccactctcaagtctttttgaaagccatttgctctacagaggtartgtccttaatctccaaggtgaactccacctgtcccagacacagcttakcactctgaagtgtaatggtgrctgcagtgctgaacagcgagcacaaagtttgctgatctctcctgccagtcaccactgaacaagtaagtcttcagatrtgccagaggtttcacatgctgagctgtaattacgttgtatctcccttyttgccctctaagagagcaaattaatggaatgtcattagaacagagtagatgctcagcaccaccctaatcctcttgctccattaatgaaatagatacttacgcttcacttgcatccaaatgacgtccaggattttcttaacagccttctattttcattccatgatttggctctga

SEQ ID NO: 95166 - DNA, 600 bp, Chicken  19866894565636_4
tcttcactgcaggaggaaaatgaggatcatacatcttctgtccaggttttaaaacagttgttttgtccaacacaaaatagatttgtgctgtgaagcatccttggaaatttccactctcaagtctttttgaaagccatttgctctacagaggtartgtccttaatctccaaggtgaactccacctgtcccagacacagcttakcactctgaagtgtaatggtgrctgcagtgctgaacagcgagcacaaagtttgctgatctctcctgccagtcaccactgaacaagtaagtcttcagatrtgccagaggtttcacatgctgagctgtaattacgttgtatctcccttyttgccctctaagagagcaaattaatggaatgtcattagaacagagtagatgctcagcaccaccctaatcctcttgctccattaatgaaatagatacttacgcttcacttgcatccaaatgacgtccaggattttcttaacagccttctattttcattccatgatttggctctgattaccactgtgataaaatgattgggtgagagagaccttagagaagtatgagaaagaatatacaggaacaagaacattc

SEQ ID NO: 95167 - DNA, 600 bp, Chicken  19866894565636_5
ttaaaacagttgttttgtccaacacaaaatagatttgtgctgtgaagcatccttggaaatttccactctcaagtctttttgaaagccatttgctctacagaggtartgtccttaatctccaaggtgaactccacctgtcccagacacagcttakcactctgaagtgtaatggtgrctgcagtgctgaacagcgagcacaaagtttgctgatctctcctgccagtcaccactgaacaagtaagtcttcagatrtgccagaggtttcacatgctgagctgtaattacgttgtatctcccttyttgccctctaagagagcaaattaatggaatgtcattagaacagagtagatgctcagcaccaccctaatcctcttgctccattaatgaaatagatacttacgcttcacttgcatccaaatgacgtccaggattttcttaacagccttctattttcattccatgatttggctctgattaccactgtgataaaatgattgggtgagagagaccttagagaagtatgagaaagaatatacaggaacaagaacattccttctaagatggaaatatctagtctgaggaggaggaaggtcttcaact

SEQ ID NO: 95168 - DNA, 599 bp, Chicken  19866894565641_1
  misc_feature (1)..(48): n is any nucleotide
nnnnnnnnnnnnnnnnnnnnnnnnnnnnnnnnnnnnnnnnnnnnnnnnaaaagcagtgtgtggagttgcatcaacagtgctcagtaattgtatgtctttgtgacagtaaaatggtattaaaataccagaagcctcaaaccaagcagctgcagtgtcaaaaagctttctaacagcttagctgccttcttgcacgtgcacgtagaatatgaagtctttcacacacatttaaggggttttgcacacagatcccatgcagatctgtagttcccgatcacagtgcctccagtccagagtaacttyggcagaataactgtctcttgagggacagcgtgggacagcaatgcttccattagataaaaaacttacagcacttgctctcactgcagtccttcaatcctgaaaggtgcggcctctctacaacactgctctctacagctacatgaaaggaggttgtgatggggtgggtgtcrgcctcttctctcaggtaacaagcaacaggatgaaagagaatggccttaagttgtgctggagagtgtgaggtggtcaggttggatattagaaagaatttcttctcagaaggaatggtggggcattggaac

SEQ ID NO: 95169 - DNA, 490 bp, Chicken  19866894565641_2
cagcttagctgccttcttgcacgtgcacgtagaatatgaagtctttcacacacatttaaggggttttgcacacagatcccatgcagatctgtagttcccgatcacagtgcctccagtccagagtaacttyggcagaataactgtctcttgagggacagcgtgggacagcaatgcttccattagataaaaaacttacagcacttgctctcactgcagtccttcaatcctgaaaggtgcggcctctctacaacactgctctctacagctacatgaaaggaggttgtgatggggtgggtgtcrgcctcttctctcaggtaacaagcaacaggatgaaagagaatggccttaagttgtgctggagagtgtgaggtggtcaggttggatattagaaagaatttcttctcagaaggaatggtggggcattggaacaggctgcccagggaggtggtagagtcactgtccctggaggtgtttaaataccacggagatg

SEQ ID NO: 95170 - DNA, 600 bp, Chicken  19866894565644_1
agcagtaggaacatcccgtgtgaaagcaggctgtaggcaaccagagtgcccgagaagacaggagagctttgcctcccctccttgccagccccagggagcctctctcccatctcctgcctcattttagaccttcctcttcttctccccttccttatgaacgcagtgctccctacacagcccccgaataacccctctgcatcacgcaattgacactgaccagcgtccgacccaaagcagatgcaccaaccctgatctaatttaacacaggatccaattggctggaagagagcagaaactctrtagcgtgctcacagccccgtggcagctgctctggcagaaccacaggctgggggaaaaaaaaaaatcacctaaatggattatggccgttgtcaggaaagcgaggagacttcctcgttagctgagcaatatttcctctggcacgcagcagtggggccagggcctgtgggacggaggatggaccatagcaacaactgtcaaagcaaaaccccatcacttacatttcaggaagtaatcgcggctctccaggcaggcgggattgttcgacttgtctggaaattgagacttggtcattgctgggga

SEQ ID NO: 95171 - DNA, 600 bp, Chicken  19866894565647_1
ggtgccagcggtacagcctgtgaatcaccatcagtgcaggatgcaatctgggctactgactcatccttattatccacacatcacccttccttccccaccagggtcacgcttccaggtcatatccacagtcctgacttcaagcatgctttcctttgcctcttccctctgctttggtcccatgaaggtggcggtgtctggagcgatgtttgctctggggataaggatgggctctgagatggactgggagccctctggttctgcctcgccttcagttctgccctccacggggagattttaagygtgttggagtgatggctttgcacaaattcccagctgacgggatgtgtgtttgggctggctgtctggtctggaattcattaggaacttttgtgtttgcagctgtctctcggattatatctttattgatcctgcctgtccatggccaatgggaaatatgtggaaatgatgaagctcttctgaaggggagttcataatcttgctcaaacaaagccaggcccccggagggaaggatgaatggcctgcgtgtaggctattttgagacgatacggctatcacatcttgttccccttgtttttgact

SEQ ID NO: 95172 - DNA, 600 bp, Chicken  19866894565649_1
ctcacagtgagctccaaaatgaaatgttttcaagcttttactccactcattatcctctatctttaccaattagccatgtaaaaacagactgaaaacactcaggctggcaacacccccatattaccacctgtatctttcaataatgctgctgccttcaccagcagcaggattcaaaggacagcatcctattctcccagttgtgccatatgaagggtgtacatccctctttttacctttatcacagcaaagagatgcatgctgccacctccagcaacgctctcccttgcagacacatgccayggtgattcaatgggcttccctgtttgtgttttgatcctcaggtggaaagtgctctatctgtggttgtgattattttcctggcttcttcagccaagtaccttggcacagccactgcaaagcaaactgagctctgccagcttatgccccagaccacatttttcctacctctcctatagaaatcaagtgcagatgatgaaacagatgtatgaacacaaccttttctcccatcaaccacaaaacagtctttccaatcctaaaaaaacaccaccatgagggttttaatttaaaatatatatatat

SEQ ID NO: 95173 - DNA, 600 bp, Chicken  19866894565652_1
actttttagcactgtaattgtatcagtggtcagtggtttttgagctgcatggtgctgaagggctacagaaagggttgtttgggatttacccggagtccgcagtgtcaatgctacagtggggatacctcctacccctacaaatttggtttgctgaactcagctgctgcaagaacactggtgtggtcctttcctaaggaccttctccatgtggatcccacaacaagtggcactgtaggtggtggtaattgattcatacgttctgtttgcttctttgtgagaaagagggaacgtgaagtctcyggtttatgtagcgtgtgtgcctgtggttgttggctttatcttcccctcrtgctgtctgtctgtctgtcccactttctgctcttttgatcatggtttggagtttaccgcacagcctctrtgaggattgggcactactgactgtctcagcacaggtagtaagggataggtaaygcgcagcggtgagggcaggggcttcacaaatgccgttaattcctgggttatcagagcctgatagctcagaccagctctgtttgcttagtgactgacagcatattctccacagatcaataggaaaattga

SEQ ID NO: 95174 - DNA, 600 bp, Chicken  19866894565652_2
tggtgctgaagggctacagaaagggttgtttgggatttacccggagtccgcagtgtcaatgctacagtggggatacctcctacccctacaaatttggtttgctgaactcagctgctgcaagaacactggtgtggtcctttcctaaggaccttctccatgtggatcccacaacaagtggcactgtaggtggtggtaattgattcatacgttctgtttgcttctttgtgagaaagagggaacgtgaagtctcyggtttatgtagcgtgtgtgcctgtggttgttggctttatcttcccctcrtgctgtctgtctgtctgtcccactttctgctcttttgatcatggtttggagtttaccgcacagcctctrtgaggattgggcactactgactgtctcagcacaggtagtaagggataggtaaygcgcagcggtgagggcaggggcttcacaaatgccgttaattcctgggttatcagagcctgatagctcagaccagctctgtttgcttagtgactgacagcatattctccacagatcaataggaaaattgatggtgaccatactgagaaagcacgttattagaaagagctgcttgtattt

SEQ ID NO: 95175 - DNA, 600 bp, Chicken  19866894565652_3
gggatacctcctacccctacaaatttggtttgctgaactcagctgctgcaagaacactggtgtggtcctttcctaaggaccttctccatgtggatcccacaacaagtggcactgtaggtggtggtaattgattcatacgttctgtttgcttctttgtgagaaagagggaacgtgaagtctcyggtttatgtagcgtgtgtgcctgtggttgttggctttatcttcccctcrtgctgtctgtctgtctgtcccactttctgctcttttgatcatggtttggagtttaccgcacagcctctrtgaggattgggcactactgactgtctcagcacaggtagtaagggataggtaaygcgcagcggtgagggcaggggcttcacaaatgccgttaattcctgggttatcagagcctgatagctcagaccagctctgtttgcttagtgactgacagcatattctccacagatcaataggaaaattgatggtgaccatactgagaaagcacgttattagaaagagctgcttgtatttgatcttgacagctatggtgggtgtgcagtcagcagagaatggaacagtctccttgctttttatatgcct

SEQ ID NO: 95176 - DNA, 600 bp, Chicken  19866894565652_4
acactggtgtggtcctttcctaaggaccttctccatgtggatcccacaacaagtggcactgtaggtggtggtaattgattcatacgttctgtttgcttctttgtgagaaagagggaacgtgaagtctcyggtttatgtagcgtgtgtgcctgtggttgttggctttatcttcccctcrtgctgtctgtctgtctgtcccactttctgctcttttgatcatggtttggagtttaccgcacagcctctrtgaggattgggcactactgactgtctcagcacaggtagtaagggataggtaaygcgcagcggtgagggcaggggcttcacaaatgccgttaattcctgggttatcagagcctgatagctcagaccagctctgtttgcttagtgactgacagcatattctccacagatcaataggaaaattgatggtgaccatactgagaaagcacgttattagaaagagctgcttgtatttgatcttgacagctatggtgggtgtgcagtcagcagagaatggaacagtctccttgctttttatatgcctttcaccctagcgaggtgttaaaatgtaaaatctggatgtcactgaggtctgta

SEQ ID NO: 95177 - DNA, 599 bp, Chicken  19866894565656_1
  misc_feature (1)..(18): n is any nucleotide
nnnnnnnnnnnnnnnnnnatggaagaaacgtaaggagatgcagtgctgaaaggaaccacaaacattgcatgaaggatagcagtgtcacacgtcaagaaaacaaagctctttcgagctgttactacaaaggtcatcactccataacagataagatggtgcactttggaatcggaggaaacttgccttgaagggatgtcataaactaccaaatcctttcctgtgtctctacacgggaacaactatatttatcttattcccaaattcttataaaattgctgtttttttttgtttgtttgtttktttcaaaaatacgaaagtctccagatcatcttattctgttctggtgcacacaatgcaatgaagcagtcttaggctcacagactttcagagaaaatggaatcaaccactagaggtatccagggttttgttttgttttgttttttgccaactcggaactactcaaaaaaaaaaaaaaaagaaaaaaaaaaaggaaaaagacataaagcagcacataattgaggatattgagcccacagcaccaaccctgtggctcttcagcttttttttcactcactccatactgctagggctcactactt

SEQ ID NO: 95178 - DNA, 600 bp, Chicken  19866894565664_1
tcaattctgtttttaaaatgagatttgcttctttttttcaattcactgatgtaagtatgtaaagaactggagtgtagacattctttttatcataagtaatacaaagataaacaacctaatgacaaattctggcataacagtaatgcttatcagattaatcattagatcataaagcatatgcatatcattattctattatccctactgaagtcaatgagaaaacagtattttcagtgaaaccaggatgtctaccaaggcattaattacttgaactttaagatttcccttttatcttacaayactgttcaagaattagtaaaatctaaggcaaacttttaaaaggcaaatatttatttgggggagaacacaaataaatacatttaggcaaaaagacttccatgagtgtacttgtttccattgctttagttcaattttacaaaaaacaaacagtatggttgtattgtattttaaattttggttgcaagaaggaagggggatgatgttygtatccaaaagctaagccaaatggagttcaattttcagttaagattrattcagtgatgctgaaatttcatgagtttctacagtaacaatgacaaa

SEQ ID NO: 95179 - DNA, 600 bp, Chicken  19866894565664_2
tgaagtcaatgagaaaacagtattttcagtgaaaccaggatgtctaccaaggcattaattacttgaactttaagatttcccttttatcttacaayactgttcaagaattagtaaaatctaaggcaaacttttaaaaggcaaatatttatttgggggagaacacaaataaatacatttaggcaaaaagacttccatgagtgtacttgtttccattgctttagttcaattttacaaaaaacaaacagtatggttgtattgtattttaaattttggttgcaagaaggaagggggatgatgttygtatccaaaagctaagccaaatggagttcaattttcagttaagattrattcagtgatgctgaaatttcatgagtttctacagtaacaatgacaaaaatctgataaatgaatcccacagggcttctaccatccttaaataatatatattccagtataaatagtttattgaaatttcagccatatcagaaccaaacatcaacaacaatcaagctcaagtctctgctgcaccccttaattaaaactagataaactgatttcatgtcaactagtgatattttatgattctgtgttcagaatcaa

SEQ ID NO: 95180 - DNA, 600 bp, Chicken  19866894565664_3
caaggcattaattacttgaactttaagatttcccttttatcttacaayactgttcaagaattagtaaaatctaaggcaaacttttaaaaggcaaatatttatttgggggagaacacaaataaatacatttaggcaaaaagacttccatgagtgtacttgtttccattgctttagttcaattttacaaaaaacaaacagtatggttgtattgtattttaaattttggttgcaagaaggaagggggatgatgttygtatccaaaagctaagccaaatggagttcaattttcagttaagattrattcagtgatgctgaaatttcatgagtttctacagtaacaatgacaaaaatctgataaatgaatcccacagggcttctaccatccttaaataatatatattccagtataaatagtttattgaaatttcagccatatcagaaccaaacatcaacaacaatcaagctcaagtctctgctgcaccccttaattaaaactagataaactgatttcatgtcaactagtgatattttatgattctgtgttcagaatcaaatgcaagtactttacattctatattaaaaacagaaatcacatttaaa

SEQ ID NO: 95181 - DNA, 493 bp, Chicken  19866894565664_4
tgaaatttcatgagtttctacagtaacaatgacaaaaatctgataaatgaatcccacagggcttctaccatccttaaataatatatattccagtataaatagtttattgaaatttcagccatatcagaaccaaacatcaacaacaatcaagctcaagtctctgctgcaccccttaattaaaactagataaactgatttcatgtcaactagtgatattttatgattctgtgttcagaatcaaatgcaagtactttacattctatattaaaaacagaaatcacatttaaaatatgcatacayttacacttagaaaacaagaatacctaacctcattcacatcacwactggtatatgctataatttcttgctcttgtagaatctcagctgaaaattatatacatacagattaactcttcctaatgtatggactttgaatattagtaactaaagcttctcttattttagtttcactctagattttatcctcatttca

SEQ ID NO: 95182 - DNA, 450 bp, Chicken  19866894565664_5
taaatgaatcccacagggcttctaccatccttaaataatatatattccagtataaatagtttattgaaatttcagccatatcagaaccaaacatcaacaacaatcaagctcaagtctctgctgcaccccttaattaaaactagataaactgatttcatgtcaactagtgatattttatgattctgtgttcagaatcaaatgcaagtactttacattctatattaaaaacagaaatcacatttaaaatatgcatacayttacacttagaaaacaagaatacctaacctcattcacatcacwactggtatatgctataatttcttgctcttgtagaatctcagctgaaaattatatacatacagattaactcttcctaatgtatggactttgaatattagtaactaaagcttctcttattttagtttcactctagattttatcctcatttca

SEQ ID NO: 95183 - DNA, 600 bp, Chicken  19866894565672_1
gaaagggaacctgggggatgtctgcagtccaacccaggacaaagagggacagaccaagttgttcagcatttgcacctgatgcattttgaaaacctccatgggcagagactgcagagcctcactgggtgacctgacattagatatttggaacgcactccaaccattcctaagatcatgatgtgaggcatggagtaggtgtggaataggaatcccagagaaatagcaggtgacccatccctagagatgttgaagatgtcgagggccccaggcatccagatctaccgcgtgacagctctgccmacagcaagggagttggaactggatagtctttaatgtcacttccaaacccaagtcattcaaggattctgtgatcgtctcactctcttccaactcaggatcttgtttgcttaggtattccctgatcacctcctctttcaccaagggcacatctgccttgcacagatatttccctcctatctctggcacctaggattccaagaagcccagcccaaatattaaacagtgaggtcaggaaggaaaggagtatcagagacttttccatgtcctgtcacaccaagatccctgccccattctactctg

SEQ ID NO: 95184 - DNA, 560 bp, Chicken  19866894565675_1
tttacaatgaaaccattctgagtatgggtttggaagaaggcggctctggcagtaatcagaactggtggtgggggctggggccggagttgtcggatatttctgctcaaactgacatttatatagcaattctatttctgctactgaaagccagaacatacaaatccatcttatccagactattaagaaatagagagcgagtgattttttttgttcccctttccttccattctctttcctttgccacctctgctttgcatcaatgtttattttgaataatgaggaaaaaactatattagcaasccaacatctatcttttagagactgrwaacgtgatgtttgaggtaaatccaaacagtacctgctggaggagtacatctctggaaattcttcttgcttgtgaaagcagtaccatagaacatatatttccttgttttgctggttttgatacttcaaaatgttagttatgagtgcrtgctgaggagagatccaaaaaagccagttggttctgttccaagtcaaacgcaagaaagccaggggaaataaaagatctaatttgaaca

SEQ ID NO: 95185 - DNA, 535 bp, Chicken  19866894565675_2
gggtttggaagaaggcggctctggcagtaatcagaactggtggtgggggctggggccggagttgtcggatatttctgctcaaactgacatttatatagcaattctatttctgctactgaaagccagaacatacaaatccatcttatccagactattaagaaatagagagcgagtgattttttttgttcccctttccttccattctctttcctttgccacctctgctttgcatcaatgtttattttgaataatgaggaaaaaactatattagcaasccaacatctatcttttagagactgrwaacgtgatgtttgaggtaaatccaaacagtacctgctggaggagtacatctctggaaattcttcttgcttgtgaaagcagtaccatagaacatatatttccttgttttgctggttttgatacttcaaaatgttagttatgagtgcrtgctgaggagagatccaaaaaagccagttggttctgttccaagtcaaacgcaagaaagccaggggaaataaaagatctaatttgaaca

SEQ ID NO: 95186 - DNA, 534 bp, Chicken  19866894565675_3
ggtttggaagaaggcggctctggcagtaatcagaactggtggtgggggctggggccggagttgtcggatatttctgctcaaactgacatttatatagcaattctatttctgctactgaaagccagaacatacaaatccatcttatccagactattaagaaatagagagcgagtgattttttttgttcccctttccttccattctctttcctttgccacctctgctttgcatcaatgtttattttgaataatgaggaaaaaactatattagcaasccaacatctatcttttagagactgrwaacgtgatgtttgaggtaaatccaaacagtacctgctggaggagtacatctctggaaattcttcttgcttgtgaaagcagtaccatagaacatatatttccttgttttgctggttttgatacttcaaaatgttagttatgagtgcrtgctgaggagagatccaaaaaagccagttggttctgttccaagtcaaacgcaagaaagccaggggaaataaaagatctaatttgaaca

SEQ ID NO: 95187 - DNA, 388 bp, Chicken  19866894565675_4
cagactattaagaaatagagagcgagtgattttttttgttcccctttccttccattctctttcctttgccacctctgctttgcatcaatgtttattttgaataatgaggaaaaaactatattagcaasccaacatctatcttttagagactgrwaacgtgatgtttgaggtaaatccaaacagtacctgctggaggagtacatctctggaaattcttcttgcttgtgaaagcagtaccatagaacatatatttccttgttttgctggttttgatacttcaaaatgttagttatgagtgcrtgctgaggagagatccaaaaaagccagttggttctgttccaagtcaaacgcaagaaagccaggggaaataaaagatctaatttgaaca

SEQ ID NO: 95188 - DNA, 599 bp, Chicken  19866894565679_1
  misc_feature (1)..(61): n is any nucleotide
nnnnnnnnnnnnnnnnnnnnnnnnnnnnnnnnnnnnnnnnnnnnnnnnnnnnnnnnnnnnnatatggattgaatttcagcgttatcaagtaataaaatggttggtatgtcaaatgtattttaatagcttagaattgattggcatcactagaattcttagttttgggctctaggtttcagagttggaatgggaccagcctgccagttttcccaaattcgtaattaacgttgcttgtttttaaagatgtcttgacataaacagagacagaattatcacaggctatcagttgtgtgctccttmcaataatttgaacagaagtgtgcaatcaktgtgcaatcaatcaaaacttttagttaatgctyaagaaaaaatcagttttttatatctaagcttttattcctgttcacaaatttagcttagatgtgacagtacagtttggcatacggtaatttatcttaggaacctgatttatattttgaaataatacagaagaattctctgtcagcactacttgatagctgctgtgatgcttctggattttaatggttgtttttgaaaacctgtgcatgcttttgttgcctttgctctgatatcatatc

SEQ ID NO: 95189 - DNA, 599 bp, Chicken  19866894565679_2
  misc_feature (1)..(32): n is any nucleotide
nnnnnnnnnnnnnnnnnnnnnnnnnnnnnnnnatatggattgaatttcagcgttatcaagtaataaaatggttggtatgtcaaatgtattttaatagcttagaattgattggcatcactagaattcttagttttgggctctaggtttcagagttggaatgggaccagcctgccagttttcccaaattcgtaattaacgttgcttgtttttaaagatgtcttgacataaacagagacagaattatcacaggctatcagttgtgtgctccttmcaataatttgaacagaagtgtgcaatcaktgtgcaatcaatcaaaacttttagttaatgctyaagaaaaaatcagttttttatatctaagcttttattcctgttcacaaatttagcttagatgtgacagtacagtttggcatacggtaatttatcttaggaacctgatttatattttgaaataatacagaagaattctctgtcagcactacttgatagctgctgtgatgcttctggattttaatggttgtttttgaaaacctgtgcatgcttttgttgcctttgctctgatatcatatctccccattttctgatcataacctcatttt

SEQ ID NO: 95190 - DNA, 600 bp, Chicken  19866894565679_3
tatggattgaatttcagcgttatcaagtaataaaatggttggtatgtcaaatgtattttaatagcttagaattgattggcatcactagaattcttagttttgggctctaggtttcagagttggaatgggaccagcctgccagttttcccaaattcgtaattaacgttgcttgtttttaaagatgtcttgacataaacagagacagaattatcacaggctatcagttgtgtgctccttmcaataatttgaacagaagtgtgcaatcaktgtgcaatcaatcaaaacttttagttaatgctyaagaaaaaatcagttttttatatctaagcttttattcctgttcacaaatttagcttagatgtgacagtacagtttggcatacggtaatttatcttaggaacctgatttatattttgaaataatacagaagaattctctgtcagcactacttgatagctgctgtgatgcttctggattttaatggttgtttttgaaaacctgtgcatgcttttgttgcctttgctctgatatcatatctccccattttctgatcataacctcattttcccccgtttacatttaatttttagaattggttca

SEQ ID NO: 95191 - DNA, 480 bp, Chicken  19866894565679_4
atctaagcttttattcctgttcacaaatttagcttagatgtgacagtacagtttggcatacggtaatttatcttaggaacctgatttatattttgaaataatacagaagaattctctgtcagcactacttgatagctgctgtgatgcttctggattttaatggttgtttttgaaaacctgtgcatgcttttgttgcctttgctctgatatcatatctccccattttctgatcataacctcattttcccccgtttacatttaatttttagaattggttcatttatttcattaaatgtattytacatcttacttagcctacattatttcctgtactttcctcctgtctctccctcacttgctttttcctgtgtcattctgatctttattaaagcttcccaactttttggtcgcctagtgatactccattgtataatctggagccctgtgaaccactgccttttgatgttgcaagatttcgtg

SEQ ID NO: 95192 - DNA, 600 bp, Chicken  19866894565680_1
aagagaaggaaaatctgctcatatgtagccatggagaatcataagatttcatctggatgtatttttttgaaaggaataccacaacattaaagcagttgatgagtttagccaagtagaagtgctctacactaaatgatgaggaagagaaagggcatgattaaaaggaattgcagccattgttcattgtcagggcacagcagagagctgacccttggtggcaagaattacaaacaggccaataaacttcaggtcaccttgggagagcttgcaagctgccaggtgtgctaaggcctctctctyggtgaccccagcatctcaccagtctcaggaagaaccaataatgtgcaaaaattatccttccaccttctctgtgcaaaagagacactaagaaatgattacactaaaaagtaaactaatggcattaagttattatgttggaaatgagagcacaaaaaaacagggagatgatcatattcctaagcaaagttgaccttctagatacaaaaagtacataaggcaatgtagagattcaaaagggcctaggggagagcccatatttcctaacagatgggcaaaacatctcagggtgcctatagcggt

SEQ ID NO: 95193 - DNA, 600 bp, Chicken  19866894565682_1
gtgagaatgataataaccgtgtttcatgaagtcaatttcttcagtagatagtcttccacaaagaaggttaaaatcattatccttatttacagacatgaaaacatgactcactgagaaattagtaacttgctcagggataatccaacccaaccaaacaggtatctgatctgctaatggagtttcaaaaagaagtcctcgttccctatatcacacctacctcccaaataacgtttaaaaagctacaactgaagaggcaacaaatgccatttagttctacagaaaagataaatttatgagggyaaaaaaaaaaaggacaaactttgggaaacgcctctcaataacaaaactacaaaaatattttgtcaacatttaatttacattttttcttttttttcttttgattatatcagttactcagtaatgtgtatatgaatgtgttcactcattactctaaaggcttggtaggtggcttttctcctttatttaaattaagaaaaaataaattatttaaaaatggttgtaggcttacttttcactttgatcttaaatcgtctttcaaatcaattagaattcakgcacacagaaattttgcttttctcc

SEQ ID NO: 95194 - DNA, 600 bp, Chicken  19866894565682_2
acagaaaagataaatttatgagggaaaaaaaaaaaaggacaaactttgggaaacgcctctcaataacaaaactacaaaaatattttgtcaacatttaatttacattttttcttttttttcttttgattatatcagttactcagtaatgtgtatatgaatgtgttcactcattactctaaaggcttggtaggtggcttttctcctttatttaaattaagaaaaaataaattatttaaaaatggttgtaggcttacttttcactttgatcttaaatcgtctttcaaatcaattagaattcakgcacacagaaattttgcttttctccttcagaaatatgaaaaggaagcaaattgggaatacgctttagaaaagcagcgctgccaagtattggattcaaagcacctgagctcaggaaattcagacgcagatataaaacttagtatttaactcctttctttctttttagtttcctttgagggaagggcagaggcttgtttggattcaaaatctgcaaagttatattatgcaaaagctcgtattgcccgctgcctttctagataaatgttcacctttgccatgagcttttgtatgtatgtatgc

SEQ ID NO: 95195 - DNA, 393 bp, Chicken  19866894565691_1
aatcagtataatttctattgtaatcatttctattttcttcttttcatgtacttaaaagagattccattatattcagtgtttccaacacttaagtaaaacactgaaatctaaatatatatatattttcgaattgctgttgtatggtttttgtttgtttgtttatttgttttttaatttcatggatgcattactgagaattaataaacaaagaagcatttttacagacttctgcaatttcaaaggtatcccattacactatattcatagtgggttttttgccttccttttgctcttattttraaacacttcctacagctttctctcaaattttcttaaattatgttaccacatagcaaaaccaacctgatttattcatttttaggaattctgtaa

SEQ ID NO: 95196 - DNA, 599 bp, Chicken  19866894565696_1
  misc_feature (1)..(97): n is any nucleotide
nnnnnnnnnnnnnnnnnnnnnnnnnnnnnnnnnnnnnnnnnnnnnnnnnnnnnnnnnnnnnnnnnnnnnnnnnnnnnnnnnnnnnnnnnnnnnnnnncttgagggtgatgtctttcaccattaaacggaaggctctgtaaaaatgacattatgtttacttaataggttaatgttttgtacctgaacctgtgaaataaactgttctatggagctgatagaaaataggatgactttctcaatctactgcacttgtaattttttgtagcatataagaatatagaagctggtgtggaaatgagraacctgcttctctgygttgcttcaagaataaaatatattttttgaaatggaggctaaaattgagacagttttggtgatgatacaatgttccataatgcaaaactaagagaaataggagaatcctgaattgcatcgtatgctgtctgttastttgtgtggttgamgtttttctttttgtcaggggaagcgaaagcaaacgcaccatgtgttatatttattgatgagttggactctgttggtgggaagagaattgaatctccaatgcatccgtattcaaggcagaccattaatcaacttct

SEQ ID NO: 95197 - DNA, 599 bp, Chicken  19866894565696_2
  misc_feature (1)..(82): n is any nucleotide
nnnnnnnnnnnnnnnnnnnnnnnnnnnnnnnnnnnnnnnnnnnnnnnnnnnnnnnnnnnnnnnnnnnnnnnnnnnnnnnnnncttgagggtgatgtctttcaccattaaacggaaggctctgtaaaaatgacattatgtttacttaataggttaatgttttgtacctgaacctgtgaaataaactgttctatggagctgatagaaaataggatgactttctcaatctactgcacttgtaattttttgtagcatataagaatatagaagctggtgtggaaatgagraacctgcttctctgygttgcttcaagaataaaatatattttttgaaatggaggctaaaattgagacagttttggtgatgatacaatgttccataatgcaaaactaagagaaataggagaatcctgaattgcatcgtatgctgtctgttastttgtgtggttgamgtttttctttttgtcaggggaagcgaaagcaaacgcaccatgtgttatatttattgatgagttggactctgttggtgggaagagaattgaatctccaatgcatccgtattcaaggcagaccattaatcaacttcttgctgaaatggatgg

SEQ ID NO: 95198 - DNA, 600 bp, Chicken  19866894565696_3
atgtttacttaataggttaatgttttgtacctgaacctgtgaaataaactgttctatggagctgatagaaaataggatgactttctcaatctactgcacttgtaattttttgtagcatataagaatatagaagctggtgtggaaatgagraacctgcttctctgygttgcttcaagaataaaatatattttttgaaatggaggctaaaattgagacagttttggtgatgatacaatgttccataatgcaaaactaagagaaataggagaatcctgaattgcatcgtatgctgtctgttastttgtgtggttgamgtttttctttttgtcaggggaagcgaaagcaaacgcaccatgtgttatatttattgatgagttggactctgttggtgggaagagaattgaatctccaatgcatccgtattcaaggcagaccattaatcaacttcttgctgaaatggatgggtaaatatctggattctgagggtatagaaggtgttgactagtattttgaatatttgggtgaatttttyttccttacagctttggttgtaagctcttaactttttmaaaacactttcaaggatataaatctatatga

SEQ ID NO: 95199 - DNA, 600 bp, Chicken  19866894565696_4
ggttaatgttttgtacctgaacctgtgaaataaactgttctatggagctgatagaaaataggatgactttctcaatctactgcacttgtaattttttgtagcatataagaatatagaagctggtgtggaaatgagraacctgcttctctgygttgcttcaagaataaaatatattttttgaaatggaggctaaaattgagacagttttggtgatgatacaatgttccataatgcaaaactaagagaaataggagaatcctgaattgcatcgtatgctgtctgttastttgtgtggttgamgtttttctttttgtcaggggaagcgaaagcaaacgcaccatgtgttatatttattgatgagttggactctgttggtgggaagagaattgaatctccaatgcatccgtattcaaggcagaccattaatcaacttcttgctgaaatggatgggtaaatatctggattctgagggtatagaaggtgttgactagtattttgaatatttgggtgaatttttyttccttacagctttggttgtaagctcttaactttttmaaaacactttcaaggatataaatctatatgatactatgaaaatgt

SEQ ID NO: 95200 - DNA, 489 bp, Chicken  19866894565696_5
caatgttccataatgcaaaactaagagaaataggagaatcctgaattgcatcgtatgctgtctgttastttgtgtggttgamgtttttctttttgtcaggggaagcgaaagcaaacgcaccatgtgttatatttattgatgagttggactctgttggtgggaagagaattgaatctccaatgcatccgtattcaaggcagaccattaatcaacttcttgctgaaatggatgggtaaatatctggattctgagggtatagaaggtgttgactagtattttgaatatttgggtgaatttttyttccttacagctttggttgtaagctcttaactttttmaaaacactttcaaggatataaatctatatgatactatgaaaatgttcttatgttactgttggcagtagtagaaagttgccattaatggccttaagtaacacagaagcttttaagttacagtagtgtagaatctacagttaaccgaaataatt

SEQ ID NO: 95201 - DNA, 452 bp, Chicken  19866894565696_6
atcctgaattgcatcgtatgctgtctgttastttgtgtggttgamgtttttctttttgtcaggggaagcgaaagcaaacgcaccatgtgttatatttattgatgagttggactctgttggtgggaagagaattgaatctccaatgcatccgtattcaaggcagaccattaatcaacttcttgctgaaatggatgggtaaatatctggattctgagggtatagaaggtgttgactagtattttgaatatttgggtgaatttttyttccttacagctttggttgtaagctcttaactttttmaaaacactttcaaggatataaatctatatgatactatgaaaatgttcttatgttactgttggcagtagtagaaagttgccattaatggccttaagtaacacagaagcttttaagttacagtagtgtagaatctacagttaaccgaaataatt

SEQ ID NO: 95202 - DNA, 482 bp, Chicken  19866894565703_1
gttctttcaagcatgacctggtttgaggaccaccttcaatgagatcaaaaggtgattttcccggtgcttgctccacataccatttactgcctgtcaactgggtggtgactatatttgattctgccctccattatttgaagtacagataactccagggaagatgattgttcaatgaatgtcaaattagcttctagagagctttcaaagccctagagatgtgttccagggcatccagggaacttcctactcaaaactgtctctgggccactctcttctgggccagttgactatatttctcasgggacagtatgtagttgctatcatgtctcacggagtctactttgcatcatggaggaagaagtcctcaaggaaacagcctgtaggaaatatgagacatctaaaccacaacccctgtgaggcagcactggggatacttatagggaaatgaggctttaatggtttattgaacacattcaagctaa

SEQ ID NO: 95203 - DNA, 599 bp, Chicken  19866894565706_1
  misc_feature (1)..(170): n is any nucleotide
nnnnnnnnnnnnnnnnnnnnnnnnnnnnnnnnnnnnnnnnnnnnnnnnnnnnnnnnnnnnnnnnnnnnnnnnnnnnnnnnnnnnnnnnnnnnnnnnnnnnnnnnnnnnnnnnnnnnnnnnnnnnnnnnnnnnnnnnnnnnnnnnnnnnnnnnnnnnnnnnnnnnnnnnnntctcctacctccgggctgcgccaagcacgctgcttctttctggaggtgccctcgtaaccccgctaccggccgaggggcctcctgaggggccgagctgcggtgcctggcgctgggcctccccctgccctgrcccggggcgcggcccctccgatcctcacggcgtggttcagtgtgcagaagggcaggctccggggaggcctcgttgctccctactgtaccctgaaaggctgtagtgaggtgggggccggcctctgctcccaggtaacagccacagaatgagagggaattgccttaagttgtgccaggggggttcaggttggatattaggaaacatttaatctcagaatgagtgttgattggcacgggctgcccagggaggtggtggagccagtgtccctgggagcgtttaagaaatgtggggatgtggca

SEQ ID NO: 95204 - DNA, 600 bp, Chicken  19866894565709_1
gcaaactgagtgaatggatacctggaatcaggtgtctcactgcaccaccgcagccctgacatcaataatgaatcaaaggattaaatgtagagctgaagcagccagaaggtaaattcagacttttaaaaagatgtagaattgctctgttactcacgtccctgtcactctgccaggtattcttaggagtctgcttggtggatgacaggggtggctgctccccttcaacacagcaaggccaggtacccagggaagccttaggctcagtaaggaaggacgtgcttaaaagaccacgtttgcccyttgagcacagtgaaactcctgaccaaggaaagatctcttcagcagatagcctttttatttgagctagtcccaaaccattacacctattcctccaggaacagcctggratcgctgcaagttttagtgtttcctggtgctgctgccagacgttgctactgcttccctgcctgctcctctcatcgtgcatgggagggcacagcactgaaaccgctccttcccatgggcaaygagggcacgccagccccacagccgggcagccacaggctttgggcacgactgggacacactgctgagctacaa

SEQ ID NO: 95205 - DNA, 600 bp, Chicken  19866894565709_2
ggtaaattcagacttttaaaaagatgtagaattgctctgttactcacgtccctgtcactctgccaggtattcttaggagtctgcttggtggatgacaggggtggctgctccccttcaacacagcaaggccaggtacccagggaagccttaggctcagtaaggaaggacgtgcttaaaagaccacgtttgcccyttgagcacagtgaaactcctgaccaaggaaagatctcttcagcagatagcctttttatttgagctagtcccaaaccattacacctattcctccaggaacagcctggratcgctgcaagttttagtgtttcctggtgctgctgccagacgttgctactgcttccctgcctgctcctctcatcgtgcatgggagggcacagcactgaaaccgctccttcccatgggcaaygagggcacgccagccccacagccgggcagccacaggctttgggcacgactgggacacactgctgagctacaagcttttatatctgagctacttctgaatagcagacagtttaactttaagacaggtaggtgacagatggctgtaggcaggggatcagagggaatcagtggtacagcagt

SEQ ID NO: 95206 - DNA, 600 bp, Chicken  19866894565709_3
agcaaggccaggtacccagggaagccttaggctcagtaaggaaggacgtgcttaaaagaccacgtttgcccyttgagcacagtgaaactcctgaccaaggaaagatctcttcagcagatagcctttttatttgagctagtcccaaaccattacacctattcctccaggaacagcctggratcgctgcaagttttagtgtttcctggtgctgctgccagacgttgctactgcttccctgcctgctcctctcatcgtgcatgggagggcacagcactgaaaccgctccttcccatgggcaaygagggcacgccagccccacagccgggcagccacaggctttgggcacgactgggacacactgctgagctacaagcttttatatctgagctacttctgaatagcagacagtttaactttaagacaggtaggtgacagatggctgtaggcaggggatcagagggaatcagtggtacagcagtagtgactgaaccrtgtgtcaggacagctgccagttatggcttatgaatcgctaggaaaggcaagagggagcggtgctctgacagagggatatgggtacctctcagcttggcttgccggggt

SEQ ID NO: 95207 - DNA, 600 bp, Chicken  19866894565709_4
ttagtgtttcctggtgctgctgccagacgttgctactgcttccctgcctgctcctctcatcgtgcatgggagggcacagcactgaaaccgctccttcccatgggcaaygagggcacgccagccccacagccgggcagccacaggctttgggcacgactgggacacactgctgagctacaagcttttatatctgagctacttctgaatagcagacagtttaactttaagacaggtaggtgacagatggctgtaggcaggggatcagagggaatcagtggtacagcagtagtgactgaaccrtgtgtcaggacagctgccagttatggcttatgaatcgctaggaaaggcaagagggagcggtgctctgacagagggatatgggtacctctcagcttggcttgccggggtagagcaggaggagaggagtagcttgtttgtaactcggagaccacgagcgagcagattgctccttgggaatgcgctccctggagagctgctgaagcacgcggagctcggaagcccaggcatccatctgcgtgcgggaggtggctgaagtcatctccaaaccccgcagacgggaggaagtcggtaagctccaaa

SEQ ID NO: 95208 - DNA, 600 bp, Chicken  19866894565719_1
ttttactcataattctattgagaaagaaaacagaactcatcatccatcctgaataattcagctctcttcaatactgcttaataccagcctggtctagtctacactgccagaagaactagagctaaatttaagatctctgcagtggaaaagagagcaccttacaagttcccatgcacacaaatacagaccaacaaggacatttcacacagcaaacacattcagggctgcttggaaaaatagtacataaaactacatgttagctatgcacaagagaagagctatcatggcttaaggatacargaagggaaagcttaatgtagtggtacattgctttttattaaaccaattcatgggatcagtgaaaaaaactcctaattgcctacatgctacttcagttgatctaacagtatttgtttcctctataaaatacacttcaattacagctgctttatgttgttttgagtcaagttaacatgacaacctaggttagcttgaagtgagacagaattaaaaaccaaagagaggaatacaaaagagtagggacaggctggtagcaggaaaaacaagaagtataaatagatcttcatatgctactttaac

SEQ ID NO: 95209 - DNA, 563 bp, Chicken  19866894565751_1
ggtaaattccattgaatgtagtcccagcttgctgaaaccccagttggagagttacctcgcagtggttacaaccctgaggccacagcagcagagccagggtgctcagcaccattggacgccccctgcttgccagcagcgtgccgaccctcagcgctgctcctcaacagccatttgccccagcctggccaaaggaagggaaacctcactgtaaacaaagctctgaccttgctgcaagggcactgtcctgcctgcagtctcacagacttctcaacttttcttaaagtttgctggaggaacacrcagaaaagcagcccaagcatttgcaaggatttgctgggagccttgccctgttctgcacatcactctgatagcactgcactgcrcagcagacagaatgcaggacggagcctgctgggtgtcacgcaccaacagcactatttgtgcttctgcctgagcagcatccatcaatcacagctgattgatagcaccacatccagccagctcccggaggagataacagtcagtaagttgttatcagtcagtattactgggggggggggggg

SEQ ID NO: 95210 - DNA, 480 bp, Chicken  19866894565751_2
agcagcagagccagggtgctcagcaccattggacgccccctgcttgccagcagcgtgccgaccctcagcgctgctcctcaacagccatttgccccagcctggccaaaggaagggaaacctcactgtaaacaaagctctgaccttgctgcaagggcactgtcctgcctgcagtctcacagacttctcaacttttcttaaagtttgctggaggaacacrcagaaaagcagcccaagcatttgcaaggatttgctgggagccttgccctgttctgcacatcactctgatagcactgcactgcrcagcagacagaatgcaggacggagcctgctgggtgtcacgcaccaacagcactatttgtgcttctgcctgagcagcatccatcaatcacagctgattgatagcaccacatccagccagctcccggaggagataacagtcagtaagttgttatcagtcagtattactgggggggggggggg

SEQ ID NO: 95211 - DNA, 600 bp, Chicken  19866894565752_1
cagtgacaacttcttgtaggtcgattgtcatcaatacgagctttaacagcaaggtaaatctacaatgtgatttttcttgaaacgagcagtttgcaagatgctgctttgcttacagagcacaaacaagctgctaacattgttctaaacaatgccctgtaagcattttagaaacatttaaaagtccttttcaaattatgctgttttcagtgccactaatatcaacagacttagcatgtagattctaagcaacatttaaaaagaataaagtgttgcactattgaattcagggtaccattttgrctatcaattcccttttactgaaacttaatacatcagacagaaagaagatattcatacctccaaaacaaagtaatcatttgacccarcttggaattctgcattcgtactactaaatatgaaaagacaagggccacaatatttagagtagtagacagtcccatttctccatccatttcaagtccctctgaatagcagcacaaccatctgttgtatcaactctcctcaatcttgtattatttgtgaacttgcagtaggtcctctcattttataacctaagccatcaatgaaaatactagacag

SEQ ID NO: 95212 - DNA, 600 bp, Chicken  19866894565752_2
cagtttgcaagatgctgctttgcttacagagcacaaacaagctgctaacattgttctaaacaatgccctgtaagcattttagaaacatttaaaagtccttttcaaattatgctgttttcagtgccactaatatcaacagacttagcatgtagattctaagcaacatttaaaaagaataaagtgttgcactattgaattcagggtaccattttgrctatcaattcccttttactgaaacttaatacatcagacagaaagaagatattcatacctccaaaacaaagtaatcatttgacccarcttggaattctgcattcgtactactaaatatgaaaagacaagggccacaatatttagagtagtagacagtcccatttctccatccatttcaagtccctctgaatagcagcacaaccatctgttgtatcaactctcctcaatcttgtattatttgtgaacttgcagtaggtcctctcattttataacctaagccatcaatgaaaatactagacagtatcaatcctggtattgacccttggtatacctattggtctccagcaggacttcatgctgctgacaacaacaggtaaggtcagcagt

SEQ ID NO: 95213 - DNA, 600 bp, Chicken  19866894565754_1
attcatagcacaaaacccatagccctacctgagcaagtggccttaaaagaaaaagaaaactaagtgcaaaaatgcagctcataactaagacatggaattctgtgcctgtgacccagtgggctgagagacacaaccagagctcatttgatgtgctgtccttgggttactgcctcaagagaaaactggtgcacctcctgatgtatctgcatcattaggcagatactgttcatcacagagctgaaaacagaactctgtttccagggtaatttaaaattgtatgcgctaatttcattaagaaayggagttcggtctgctcattaatgtggttcgatgctagggttgcagggtgtcctctaagtaggtaaatggaaaagatgcattctatcaatgtttgagtgagtgggtctttgggagatgtgacatgattttgtttctgcacggtacagttgaacacatttattgtctaaatgtagcacggcagctggtacaacaagctgctcctgtcagtgctgatattaacagcaagactcgtctgagaagagacagtacctcctccaggctggaacaatgattcagctgacctactgtgagcagaataat

SEQ ID NO: 95214 - DNA, 599 bp, Chicken  19866894565756_1
  misc_feature (1)..(148): n is any nucleotide
nnnnnnnnnnnnnnnnnnnnnnnnnnnnnnnnnnnnnnnnnnnnnnnnnnnnnnnnnnnnnnnnnnnnnnnnnnnnnnnnnnnnnnnnnnnnnnnnnnnnnnnnnnnnnnnnnnnnnnnnnnnnnnnnnnnnnnnnnnnnnnnnnnnntgtaaagagctcagccttctgtctttgttttgatgtgggtgtggattaagctgtttaacaaaaagtgttggtaaagttcacattcctcaacgctttgtgaaggcttgcttaaatacagactttctaaaataagatgtaattcaagtcttctygataaacgaggataatttcattccttatatagttcattgatagtcacctgggagccttcacttagcctaaatagcgtctgcatcgaaaagcatcctcttttgtatttgaaagcttaggtacttttcccatctctaacagttgctttaacagaaggcatccgtttgtgcaaacctttctttaaggtattataaagcatgtgagaaatagaagaaattcgagggattattgcagagacacttctgaccagaaatgtcgggatcggtttggggagggagacaatacctgaaagaagtatgac

SEQ ID NO: 95215 - DNA, 600 bp, Chicken  19866894565756_2
ggataatttcattccttatatagttcattgatagtcacctgggagccttcacttagcctaaatagcgtctgcatcgaaaagcatcctcttttgtatttgaaagcttaggtacttttcccatctctaacagttgctttaacagaaggcatccgtttgtgcaaacctttctttaaggtattataaagcatgtgagaaatagaagaaattcgagggattattgcagagacacttctgaccagaaatgtcgggatcggtttggggagggagacaatacctgaaagaagtatgacaaggaaaaaraaagcataaaaraaaawaaattaatcagatctgatgattgcctctggcactctcggaattttggaacaaatgttttacagtgaaactggagaggattaatacaaatacaaacacttgtttttcgctggggaattttttttttccttctgtgtctttgcttaaatgtcccctgtctgttatgcctactggcttctgctctctgttgcaaaaacaggaattttaatgttcatcttttttgcagaagtttttttttttaagcaaaggcatcaaatgtaaccatatccctcaatatcatttttc

SEQ ID NO: 95216 - DNA, 600 bp, Chicken  19866894565756_3
tccttatatagttcattgatagtcacctgggagccttcacttagcctaaatagcgtctgcatcgaaaagcatcctcttttgtatttgaaagcttaggtacttttcccatctctaacagttgctttaacagaaggcatccgtttgtgcaaacctttctttaaggtattataaagcatgtgagaaatagaagaaattcgagggattattgcagagacacttctgaccagaaatgtcgggatcggtttggggagggagacaatacctgaaagaagtatgacaaggaaaaaraaagcataaaaraaaawaaattaatcagatctgatgattgcctctggcactctcggaattttggaacaaatgttttacagtgaaactggagaggattaatacaaatacaaacacttgtttttcgctggggaattttttttttccttctgtgtctttgcttaaatgtcccctgtctgttatgcctactggcttctgctctctgttgcaaaaacaggaattttaatgttcatcttttttgcagaagtttttttttttaagcaaaggcatcaaatgtaaccatatccctcaatatcatttttcagttgagtgctg

SEQ ID NO: 95217 - DNA, 600 bp, Chicken  19866894565756_4
atatagttcattgatagtcacctgggagccttcacttagcctaaatagcgtctgcatcgaaaagcatcctcttttgtatttgaaagcttaggtacttttcccatctctaacagttgctttaacagaaggcatccgtttgtgcaaacctttctttaaggtattataaagcatgtgagaaatagaagaaattcgagggattattgcagagacacttctgaccagaaatgtcgggatcggtttggggagggagacaatacctgaaagaagtatgacaaggaaaaaraaagcataaaaraaaawaaattaatcagatctgatgattgcctctggcactctcggaattttggaacaaatgttttacagtgaaactggagaggattaatacaaatacaaacacttgtttttcgctggggaattttttttttccttctgtgtctttgcttaaatgtcccctgtctgttatgcctactggcttctgctctctgttgcaaaaacaggaattttaatgttcatcttttttgcagaagtttttttttttaagcaaaggcatcaaatgtaaccatatccctcaatatcatttttcagttgagtgctggagag

SEQ ID NO: 95218 - DNA, 455 bp, Chicken  19866894565759_1
tatagctcttacgtttggcagttgcagatttcagctgaatagctttagggaggattttctagcagtacaagttaggtttaatttgtaccaaccttattttgaatatgccctgctgtttgatgaagagacatcaatggctgctcaggggaagagtggttggtggcaggagaggacaaggtcagaggtaactcaggagcacacgaacaagcctcagaatgacaagaggcgttttggcaagtgacacaactggaatatttagcagcagggcagtgataatgctaaactgcagtttttgttctktaatgaaagaagtgtggttatagtttgtgggagacttgctcttggctgctctggtactgtgtagtaacgctgcttagagatgtctgtggagaaaagctgttgtccttgccattgtttgtatactgcctatgcttagagaacacttatgttctgat

SEQ ID NO: 95219 - DNA, 600 bp, Chicken  19866894565762_1
aacaacagtcttcagatgcaaatatcaaatgtgcctctttttcatctaataaatttgaagccaaacatcttgtctgaaagaacatttcaaaagaaggttccatgaagcccacagctgcctcctgagcatcacagccacagaagaaaacatgaaattcctcatatacaaccacatacaattgtagcaattgaatgtttggatatttccaacactatcaatcaaaaaagtaatcaatgtctcagttttaatacaataggatctcagagtttgtgtacaggtactcactaggcaggtcatggkgcctcaaaagttctattaaaaacttcataccagattacagaggaaaaacaaacaaacaaaaatacagaaaaccacatgttgcacacctttagcgttgcactacttgctcttgaaaagcatccttgaagttttgcttacaggtcacatgaagtgagatctgcttccaaagctacagtaataatgaaatgattactttcaagagctaccatcaatgccactcagcctcagagctttgtacctgacagatggtggaagacattactgaagcagcatcaggagcgagcatttttttattattat

SEQ ID NO: 95220 - DNA, 600 bp, Chicken  19866894565791_1
atgtctttgagtactgtccaacgaggactgcaatggaatcataaactatacgtggacgtgcatggaaacagacagactcctttcccagcaatgcactgtagaagggaccacgtgctctgtcctgctagcatcactgaggcaatgccctggtgagatgtcagtgagtccactttcactggaacactgggggtattaccattgatgtaatgcaatagcacaaccatttgcatggacattcagaactgcaagtaattgtgcctctgtaggaaagaggcaatgcaggagtttgttgtatttaamccaaacataaagactgaaggatataaaccctagtgtgtggctgacaaatcggcataaaaacatctttcaacagtaaactgcttaagtcataaggaatgtaactgctgtagtacaaccacagcccttgtgcttcgtcaagtcttaagaaagcacactaaaggtgcagttatctcatgtgaaccacgttgcttgaagcttatttactagtactttgattcttttttctttcagtttatgcactatatgcaatgctagtaatcattttgaaagcactgtctattgggcagtataaaattttgc

SEQ ID NO: 95221 - DNA, 599 bp, Chicken  19866894565797_1
  misc_feature (1)..(50): n is any nucleotide
nnnnnnnnnnnnnnnnnnnnnnnnnnnnnnnnnnnnnnnnnnnnnnnnnnatgcaataactcaatgcctcacattgacttaatggtactggtcaggtggatctcacctcagtgcagacaccactggaggcacttctgggtgctgcctgatttttcttaacagtctcttttaatcctgattgatggagagggttttccaatccagagcatttcacttgtatctctgaccaggacttctttagcaatgtgatcaaaggcaaagatattttgtagggtgatttgttgctgaagcagacagaamrtggtgtttcacactagccgctgaggagtggctccagaaaggctttgcaagcattatggctctgagcaggctcaccttttagcccaaggtagtagatgaggtgcagcatggtgtcatcagtagctaggaggtttctcagacagcagtaccatttccttgttggagaatccttgtgggcatgtcaaggataaactcttagtttcaaaggagtagcatgagtgctgttaatcattgccatgraatcaaagaacttgtcttaccctgttattgagaaaaaagtcatctaaaattttatctka

SEQ ID NO: 95222 - DNA, 599 bp, Chicken  19866894565797_2
  misc_feature (1)..(49): n is any nucleotide
nnnnnnnnnnnnnnnnnnnnnnnnnnnnnnnnnnnnnnnnnnnnnnnnnatgcaataactcaatgcctcacattgacttaatggtactggtcaggtggatctcacctcagtgcagacaccactggaggcacttctgggtgctgcctgatttttcttaacagtctcttttaatcctgattgatggagagggttttccaatccagagcatttcacttgtatctctgaccaggacttctttagcaatgtgatcaaaggcaaagatattttgtagggtgatttgttgctgaagcagacagaamrtggtgtttcacactagccgctgaggagtggctccagaaaggctttgcaagcattatggctctgagcaggctcaccttttagcccaaggtagtagatgaggtgcagcatggtgtcatcagtagctaggaggtttctcagacagcagtaccatttccttgttggagaatccttgtgggcatgtcaaggataaactcttagtttcaaaggagtagcatgagtgctgttaatcattgccatgraatcaaagaacttgtcttaccctgttattgagaaaaaagtcatctaaaattttatctkac

SEQ ID NO: 95223 - DNA, 582 bp, Chicken  19866894565797_3
gcaatgtgatcaaaggcaaagatattttgtagggtgatttgttgctgaagcagacagaamrtggtgtttcacactagccgctgaggagtggctccagaaaggctttgcaagcattatggctctgagcaggctcaccttttagcccaaggtagtagatgaggtgcagcatggtgtcatcagtagctaggaggtttctcagacagcagtaccatttccttgttggagaatccttgtgggcatgtcaaggataaactcttagtttcaaaggagtagcatgagtgctgttaatcattgccatgraatcaaagaacttgtcttaccctgttattgagaaaaaagtcatctaaaattttatctkacaatggcaaatctcagtaacttgccaaagcacaaatcaaagcctactggtttttcttctcattgaaattttgtttatgcctcatctcaaggaaaacatcccatacaatcaggagattagcaggaaggtactgaattagatagaatgtttaaaaaactcattaacatctatcaagatgtcagtctgattcttgggaagtgtttaaaagctttgacccacccatt

SEQ ID NO: 95224 - DNA, 524 bp, Chicken  19866894565797_4
amrtggtgtttcacactagccgctgaggagtggctccagaaaggctttgcaagcattatggctctgagcaggctcaccttttagcccaaggtagtagatgaggtgcagcatggtgtcatcagtagctaggaggtttctcagacagcagtaccatttccttgttggagaatccttgtgggcatgtcaaggataaactcttagtttcaaaggagtagcatgagtgctgttaatcattgccatgraatcaaagaacttgtcttaccctgttattgagaaaaaagtcatctaaaattttatctkacaatggcaaatctcagtaacttgccaaagcacaaatcaaagcctactggtttttcttctcattgaaattttgtttatgcctcatctcaaggaaaacatcccatacaatcaggagattagcaggaaggtactgaattagatagaatgtttaaaaaactcattaacatctatcaagatgtcagtctgattcttgggaagtgtttaaaagctttgacccacccatt

SEQ ID NO: 95225 - DNA, 600 bp, Chicken  19866894565802_1
aacctacctgcatcactggtaaagcacatggcctcctttatggaagtgttttaagttacactacaaatattttagattccaaaaactctgtatttttggtataactcaaaagctaatataatattttaaagctcaaagagccatatgtcttctgccaaaactaaacctctctgccaacgtctctcggatatatagtcatactttctttcttgcactgagattattcctgggggcttcatatggatgttgacactaatacaatctacaaccagacaggagcacagagtacttccacatagwttttaacgcaagaacaaatgcacaatacaaaaacagtttcaacatgcaaactaaagcatttccaagtgctgaaagcatctcttaaccatctgcttcgagctgatacattgctcaagtctgcagaagagcagttctgccaagctccttcagatgtttctcccccaacacctgagcctctgcctgatggagctgtgtgtgctttctcatcaaaacccagagaccaagacttccaaggtgttcagtcacatcacttcttccgaactcaaggtgatgaagacctcaccttggaaagttgaggcc

SEQ ID NO: 95226 - DNA, 599 bp, Chicken  19866894565803_1
  misc_feature (1)..(102): n is any nucleotide
nnnnnnnnnnnnnnnnnnnnnnnnnnnnnnnnnnnnnnnnnnnnnnnnnnnnnnnnnnnnnnnnnnnnnnnnnnnnnnnnnnnnnnnnnnnnnnnnnnnnnntatatggtataatattgactagattttccttgtacataccagagaaagttctttcatcatactctttccttggggctgttgaagatattatcctgcaggctttatgtgcttcttgtacactatggtgagtattgattttattataagaaggcatagctagaaatttactgtacaataatgaacctatttctacagaaracacctatctaatgaacaaatctctgcccctggtaaggatacaaaatttaggaataagctaaaatctacttattatactgcatgttatttgttgagagtactgaaatggcttttattaattgagtctaaaatatttttattggaaactaaaatgatagataattttagcttttttatttccaaattttgaaactatgtttgcagataatgagcagtgtcactctctattactaatcctaaactacttctctaaatataggctactggacacttttctgcaatcagtcagtggagtctgt

SEQ ID NO: 95227 - DNA, 600 bp, Chicken  19866894565813_1
atttcctgtcttgtctttttaatgagctgacagttaagagacttgaaattaggtatgacaaacacaaattaaatgcttgtaactagctgaaaagaaattatctgtcaagatcttatctgtaagagaaaaagagaacatacttgtggaagaggagacaggccttgtgaacattagtaactgtaaagaacaaattttggttgaaggctactctgttaagctagtaagcatttctacagttttatgtcaaatagccttatctaccaggtactaccaagagttttcaaatatatgtagttgttwatctcctttctttaactgctcatctgtcacttaagtacctgtgatagcctcaaaacaactcagattaatctaatctttgaaacatttacactcttattggtggatttatgcagtgatgtttaattgctgctggcttcctatatcatgaagctctgttagacaaaatcccggaactgtgaacaaggattctcaggataggtattttcttcccctagcctctctctagcttgctctaagttcttctaaaaccatctctatgggtttcttttatgccagcagagatcaaggatgaaagaactt

SEQ ID NO: 95228 - DNA, 600 bp, Chicken  19866894565814_1
acaggaaaccaacttcattatacagagctgctaatgctgcatgtggaagatgattacttctagtcactgctcgctctgggtggagctgggagctgaagatgaaagcagttcagaggactccgtgagtccgtacagcagtgctaggctttagacttgaatttagatcctgttccacgttggaccagtcatggcatctgagggcatgtactgcttctctgacaaaactcaaactctgataggcccaaggcacattgggtggtacaacaataattagtactgcacagcctggagagtaggaaragggaaagccgtattaaatgaaatcattctaaaagtggctagaggttgggatacttcctggcttctttatctgtgccaagtcaatgaattgtcttaaagggaaaaggataagtagataaaacagaacatgactatttcttttgtgtgtgtgtgtgtgtgtgtgcgcctttattcagttgcaggaatgaacaagtatttccagcctttttaccagcccaacgaatgcgggaaagcactttgtgtaaggccagatgtcatggaactggatgagctctatgagttcccagaatattcacgaga

SEQ ID NO: 95229 - DNA, 498 bp, Chicken  19866894565814_2
aggctttagacttgaatttagatcctgttccacgttggaccagtcatggcatctgagggcatgtactgcttctctgacaaaactcaaactctgataggcccaaggcacattgggtggtacaacaataattagtactgcacagcctggagagtaggaaragggaaagccgtattaaatgaaatcattctaaaagtggctagaggttgggatacttcctggcttctttatctgtgccaagtcaatgaattgtcttaaagggaaaaggataagtagataaaacagaacatgactatttctttrgtgtgtgtgtgtgtgtgtgtgcgcctttattcagttgcaggaatgaacaagtatttccagcctttttaccagcccaacgaatgcgggaaagcactttgtgtaaggccagatgtcatggaactggatgagctctatgagttcccagaatattcacgagatcctaccatgtatctggccttgagaaacctgattttggct

SEQ ID NO: 95230 - DNA, 498 bp, Chicken  19866894565814_3; identical to SEQ ID NO: 95229

SEQ ID NO: 95231 - DNA, 599 bp, Chicken  19866894565817_1
  misc_feature (1)..(178): n is any nucleotide
nnnnnnnnnnnnnnnnnnnnnnnnnnnnnnnnnnnnnnnnnnnnnnnnnnnnnnnnnnnnnnnnnnnnnnnnnnnnnnnnnnnnnnnnnnnnnnnnnnnnnnnnnnnnnnnnnnnnnnnnnnnnnnnnnnnnnnnnnnnnnnnnnnnnnnnnnnnnnnnnnnnnnnnnnnnnnnnnnnattttgtacactgtgtatatatgtatatatgcaagtattcatcgcattgtcataggttttgtgcatctgctctgtgtttcaaatagtttgatcttacacctgggcaattaattacctaactktacttctacagcatagaaccatagaattaccaaggctggaaaagacctacaaggtcatccaactgtccacctatcaccaatagttcccactaaaccatgtccctcaacacaacgtctaaacattccttgaatacctccagggtcagtgactccaccacctccctgggcagcccattccagcacatgaccgctcttttggaaaagtagtatttcctaatgtccagcctgaatctcccctggcacaacttgaggccattccctctagtcctgtcactagttacacgagagaagaggcctat

SEQ ID NO: 95232 - DNA, 600 bp, Chicken  19866894565817_2
catagaaccatagaattaccaaggctggaaaagacctacaaggtcatccaactgtccacctatcaccaatagttcccactaaaccatgtccctcaacacaacgtctaaacattccttgaatacctccagggtcagtgactccaccacctccctgggcagcccattccagcacatgaccgctcttttggaaaagtagtatttcctaatgtccagcctgaatctcccctggcacaacttgaggccattccctctagtcctgtcactagttacacgagagaagaggcctatacaatataatgkaaagaagtaaatcccaatataatttttttagagttgtggctgacacagagcaagttctgaagtaattaaatcaagtctgagcaactatggacatcgtcttacgtatcacccagcaaatcttggcctaagcaggtttgctgcgtattttctgcaatattatttggacttgcttttaaagatctccaggtctaaaatgacaaagctggactgtaatgacatcattatttagatgatgctgcaccamtacacttacagagaaaaaagactaagtgtcttttactagcaatgtttaggaacagc

SEQ ID NO: 95233 - DNA, 465 bp, Chicken  19866894565817_3
ttccctctagtcctgtcactagttacacgagagaagaggcctatacaatataatgkaaagaagtaaatcccaatataatttttttagagttgtggctgacacagagcaagttctgaagtaattaaatcaagtctgagcaactatggacatcgtcttacgtatcacccagcaaatcttggcctaagcaggtttgctgcgtattttctgcaatattatttggacttgcttttaaagatctccaggtctaaaatgacaaagctggactgtaatgacatcattatttagatgatgctgcaccamtacacttacagagaaaaaagactaagtgtcttttactagcaatgtttaggaacagctaaccctgtgaatttagggagcctgttagccctgctgaagacagggagccagtgagagctctgtacacacaggggaggcagaaagggatgctggaggataggaatctga

SEQ ID NO: 95234 - DNA, 599 bp, Chicken  19866894565818_1
  misc_feature (1)..(33): n is any nucleotide
nnnnnnnnnnnnnnnnnnnnnnnnnnnnnnnnntctgtggcagcaggtggctgtcacctccgcttcttccgaataagtagatgagatgatttcacagcaattatggagatgccataattctatgcacaggattttctagagagaagttttcacaggcattgaccaaaagtaacgtccagaacttgcctgaaaattgagagatcaggtaaaattaggaatgtgcaatgcggaagactagaaaagttccgttccctgtatgtaatttgaacaggtaaatgataacagtaatgccttatgccwatggtggtgctccagtgtctctaatcatgttacataattaatctcctgctttattgtgttactggctaacttttagcaatacccacctgcaaaatacatctaaccaaaggttatcgtgtggctatcaaagctttagctttgatcctgtgggaaaagagattcagatgctgtttgatatcagatgtgtgtttttctgaaggcattatatattgcagctcccaataatatttgatattggttttgacagcagtaggatgcctgactttgagttaacatagtgttagcagctatagctgaga

SEQ ID NO: 95235 - DNA, 600 bp, Chicken  19866894565825_1
gtacagctctgatcagaacagattaccagccaacccttcagattctgttcctcttattattctgatagttgtcatcatgcttcttccatatccttttcacagtctcctaaaaaaagcaactatgcatgttgttacatcactgtgcttcattcagcagccctgctgaggtagtttggccctcaaagagaaaataatggcactaacatttatgtccatttggttaagccatttgccattatgttatatggtttacaggagagatgaaagccaagggaaaatagttttaatatagaatatacraaatgtcattctgctgtgacaggccttcaaaggaaggctacaaamcagatggattattttgttgattacaatgtactccaagtgtcattgcatagtatctctagtcactaagcacagtaccttatatccatcaaagtgataaaaatatctttcattataaaattagataaaagcacagcaagcaaaaagcatagtatttcataaggtttagtaagttcacctgtcttagaagtttttttaaaaatatgtcttttcataatggtttattagtcgtcagttcccattttccctttcattatg

SEQ ID NO: 95236 - DNA, 600 bp, Chicken  19866894565825_2
tgttcctcttattattctgatagttgtcatcatgcttcttccatatccttttcacagtctcctaaaaaaagcaactatgcatgttgttacatcactgtgcttcattcagcagccctgctgaggtagtttggccctcaaagagaaaataatggcactaacatttatgtccatttggttaagccatttgccattatgttatatggtttacaggagagatgaaagccaagggaaaatagttttaatatagaatatacraaatgtcattctgctgtgacaggccttcaaaggaaggctacaaamcagatggattattttgttgattacaatgtactccaagtgtcattgcatagtatctctagtcactaagcacagtaccttatatccatcaaagtgataaaaatatctttcattataaaattagataaaagcacagcaagcaaaaagcatagtatttcataaggtttagtaagttcacctgtcttagaagtttttttaaaaatatgtcttttcataatggtttattagtcgtcagttcccattttccctttcattatgaggaacaatacatcttcagagaaagacatgaaataatgattgttc

SEQ ID NO: 95237 - DNA, 600 bp, Chicken  19866894565825_3
tcataaggtttagtaagttcacctgtcttagaagtttttttaaaaatatgtcttttcataatggtttattagtcgtcagttcccattttccctttcattatgaggaacaatacatcttcagagaaagacatgaaataatgattgttcctggcagtgcactgatacatccatctcacagtatttggtcaaattcagtgcatttgagaaagacagaagaggagagaaaacaaggattgcatgtgtctaagtacatgaaggtaagtacagggacatcagcgtgattttatttttatttttttwtttttttttacaaactgtaaaaagcataaaatactgttcttagagcatgatattgtaatgcaggcatacatatattttccaatagaataaaattacctttaactgagctttatcatagaataactgtgagagaaagtgatatctacacactgtatctcgatagtaaataaataaataaataaaaaagatctatttacctataaatgtcagaaatctgaataatataataaagatgtgattaaaatagagggttacagtaagcagagctgtttactctttcatggatttgcttttgtttca

SEQ ID NO: 95238 - DNA, 600 bp, Chicken  19866894565829_1
tcacttcatcgctatgtcctagcagtgagcaggctcacccttacaaaaatcccctgctgcacacaccaacaggagagtagtgactgggaggaggtttctggaggctcaggacatacaggcaagacatacagtattatttcaggaagtaactgtggggcaaaagtggggagccagagaaacgggccttcgcatccaacaacatttccagccacatgttcagtctattttctaacggcctgttttctaaggtacgcaactggcttactgacacctgctggagatgaagaacctatggttgtkagaagttgaaactcatcaaagctaccaacagcaccagagcactgtaagatctacttcttggcccggcagcrccacascacacggctcygtcactccggtcactgatcttgtcgggtcagaaacagaaagcaacggcttttcagagctctttgatgagaagtgctgaattagcacctacaggaagagcttcaccacgtgggaggacacagggcgatgtccactcgaaagcctgggcaccagggaccgggtgcagcaggacttggcatctcggcagccaagggatgctgaccgagatactcc

SEQ ID NO: 95239 - DNA, 600 bp, Chicken  19866894565829_2
ggagagtagtgactgggaggaggtttctggaggctcaggacatacaggcaagacatacagtattatttcaggaagtaactgtggggcaaaagtggggagccagagaaacgggccttcgcatccaacaacatttccagccacatgttcagtctattttctaacggcctgttttctaaggtacgcaactggcttactgacacctgctggagatgaagaacctatggttgtkagaagttgaaactcatcaaagctaccaacagcaccagagcactgtaagatctacttcttggcccggcagcrccacascacacggctcygtcactccggtcactgatcttgtcgggtcagaaacagaaagcaacggcttttcagagctctttgatgagaagtgctgaattagcacctacaggaagagcttcaccacgtgggaggacacagggcgatgtccactcgaaagcctgggcaccagggaccgggtgcagcaggacttggcatctcggcagccaagggatgctgaccgagatactcctcrtcccggctgccctcccgagctcattctgctagtgcctgaagcagcctttttctcatgatcccattggc

SEQ ID NO: 95240 - DNA, 600 bp, Chicken  19866894565829_3
tagtgactgggaggaggtttctggaggctcaggacatacaggcaagacatacagtattatttcaggaagtaactgtggggcaaaagtggggagccagagaaacgggccttcgcatccaacaacatttccagccacatgttcagtctattttctaacggcctgttttctaaggtacgcaactggcttactgacacctgctggagatgaagaacctatggttgtkagaagttgaaactcatcaaagctaccaacagcaccagagcactgtaagatctacttcttggcccggcagcrccacascacacggctcygtcactccggtcactgatcttgtcgggtcagaaacagaaagcaacggcttttcagagctctttgatgagaagtgctgaattagcacctacaggaagagcttcaccacgtgggaggacacagggcgatgtccactcgaaagcctgggcaccagggaccgggtgcagcaggacttggcatctcggcagccaagggatgctgaccgagatactcctcrtcccggctgccctcccgagctcattctgctagtgcctgaagcagcctttttctcatgatcccattggcagaaaa

SEQ ID NO: 95241 - DNA, 600 bp, Chicken  19866894565829_4
aggaggtttctggaggctcaggacatacaggcaagacatacagtattatttcaggaagtaactgtggggcaaaagtggggagccagagaaacgggccttcgcatccaacaacatttccagccacatgttcagtctattttctaacggcctgttttctaaggtacgcaactggcttactgacacctgctggagatgaagaacctatggttgtkagaagttgaaactcatcaaagctaccaacagcaccagagcactgtaagatctacttcttggcccggcagcrccacascacacggctcygtcactccggtcactgatcttgtcgggtcagaaacagaaagcaacggcttttcagagctctttgatgagaagtgctgaattagcacctacaggaagagcttcaccacgtgggaggacacagggcgatgtccactcgaaagcctgggcaccagggaccgggtgcagcaggacttggcatctcggcagccaagggatgctgaccgagatactcctcrtcccggctgccctcccgagctcattctgctagtgcctgaagcagcctttttctcatgatcccattggcagaaaaggtaattaaat

SEQ ID NO: 95242 - DNA, 571 bp, Chicken  19866894565829_5
agttgaaactcatcaaagctaccaacagcaccagagcactgtaagatctacttcttggcccggcagcrccacascacacggctcygtcactccggtcactgatcttgtcgggtcagaaacagaaagcaacggcttttcagagctctttgatgagaagtgctgaattagcacctacaggaagagcttcaccacgtgggaggacacagggcgatgtccactcgaaagcctgggcaccagggaccgggtgcagcaggacttggcatctcggcagccaagggatgctgaccgagatactcctcrtcccggctgccctcccgagctcattctgctagtgcctgaagcagcctttttctcatgatcccattggcagaaaaggtaattaaatttcattgtggggtgtcccatatgccaaatgtttagagacaggactgaaaaatttattttcccaattcccttgggttcacattcctggctgaatttccagatccttatgtcaggtttgcacttacttacgttcattccccttacaggtacctcggttattgatgacttgcagcagaatgaaatgttt

SEQ ID NO: 95243 - DNA, 600 bp, Chicken  19866894565831_1
gttacaaacatccaacattttctgggaaggtgtaatgactccaaatgccacataaactctaggggaaattgttttcagaaaggacacttcccacagaagcagtggagtcatcagccctggaggtgcttgagaaaagggcagacagggcacagagcaattacagaatcataggatggcctgggatgcaaaggaccacagtgatcatctagtttcaaccccctgctatgtgcagcatcgccaaccatcagaccaggctgcccagagccacatccagcctggccttaaatgtctccagcaacrgggcatccacaatttccttgggcaacctgttccagtgcatcaccaccctctgggtgaaaaacttcctcctcaaatctaacctaaacctcccgtctcagtttaaaaccattcccccttgtcctatcactatccaccctcatcaacagttgcatggatgtgggtgtgggcatggtgaagatgggctgactgctggacaaggttatctaagaggtcctttccaaccttaatgattctatgattctttgattatgagatgagaaagagaaggtcaaataggtgagcaacatcccttctttgctc

SEQ ID NO: 95244 - DNA, 600 bp, Chicken  19866894565833_1
gactacatatcattgcatattgtctttttatgaagtctcgataacactttgaacgtgaaacaaattattccttctcacaaaactctgtaacattttttgtagctactctacaattagataggtgtgatttgtagtatgtaagtgaagtgcattagaaaacttcagtctttttgtctgatctcaattacagatacatttggaatgacttcatgaagtcactgtgattttactggtgtaaaaagtttaacataattaggttcacaatgcataaactccatgtgtttgtagctgaagttataraaggagaaaaacagcagtgggccttcctctgtagagaacatttctgtcccagtaaaatagaatttccccttgtattatagaatcaaatgctggtacagacacagtttttactttcactagttaggcagtaggtgatgcattctgggaagccacaaaatcttgaagcagaagagaaatctaggtgcttttacattattaatatggaggtgctttgaaatacagactcctgaaatcactttttctatccaccttgtaaaatttggtttacagcttagattcaagctttggaacaggctgccc

SEQ ID NO: 95245 - DNA, 599 bp, Chicken  19866894565837_1
  misc_feature (1)..(14): n is any nucleotide
nnnnnnnnnnnnnnttcagcaaaaatcactttccaaatgggtaaaactgctgggagcaagagcttcttgatgcaaaattgctgtatcctacagaaaagcttaacagcattccaaatgggggaagacttggatgtcattttcttcgaaggttccttagaacattaaatagtctatttgtactctttgcagatatttactttcatgaaaccagaaataaagctgatcttattgaagaaacttgaaggatcccacttttttttgttttgttttgcatgctgtgtcatcaacttaattgttaaygaccgttaacaattacttcttaaatgctgggttcagagaaaaaggagagtctttcctagcttaatgattacctctttatcatcatctgtggatctgaggaaatacttgagtcttcaactagtttcttggtaaagcactacagattagctgccctcaagaatccaaagagctaaatttattctcaacacagaaaaggtgatgattcaaaataacaagaaargaattgaaaataatgaagggaggttattacttcccttttttaaagaggttggacagtatgatattattaaaaataaaga

SEQ ID NO: 95246 - DNA, 600 bp, Chicken  19866894565837_2
actgctgggagcaagagcttcttgatgcaaaattgctgtatcctacagaaaagcttaacagcattccaaatgggggaagacttggatgtcattttcttcgaaggttccttagaacattaaatagtctatttgtactctttgcagatatttactttcatgaaaccagaaataaagctgatcttattgaagaaacttgaaggatcccacttttttttgttttgttttgcatgctgtgtcatcaacttaattgttaaygaccgttaacaattacttcttaaatgctgggttcagagaaaaagyagagtctttcctagcttaatgattacctctttatcatcatctgtggatctgaggaaatacttgagtcttcaactagtttcttggtaaagcactacagattagctgccctcaagaatccaaagagctaaatttattctcaacacagaaaaggtgatgattcaaaataacaagaaargaattgaaaataatgaagggaggttattacttcccttttttaaagaggttggacagtatgatattattaaaaataaagaaaatagaagtgaatagaatgtagttgaagttgtagacctgttcaaa

SEQ ID NO: 95247 - DNA, 600 bp, Chicken  19866894565837_3
ctgctgggagcaagagcttcttgatgcaaaattgctgtatcctacagaaaagcttaacagcattccaaatgggggaagacttggatgtcattttcttcgaaggttccttagaacattaaatagtctatttgtactctttgcagatatttactttcatgaaaccagaaataaagctgatcttattgaagaaacttgaaggatcccacttttttttgttttgttttgcatgctgtgtcatcaacttaattgttaaygaccgttaacaattacttcttaaatgctgggttcagagaaaaaggygagtctttcctagcttaatgattacctctttatcatcatctgtggatctgaggaaatacttgagtcttcaactagtttcttggtaaagcactacagattagctgccctcaagaatccaaagagctaaatttattctcaacacagaaaaggtgatgattcaaaataacaagaaargaattgaaaataatgaagggaggttattacttcccttttttaaagaggttggacagtatgatattattaaaaataaagaaaatagaagtgaatagaatgtagttgaagttgtagacctgttcaaat

SEQ ID NO: 95248 - DNA, 570 bp, Chicken  19866894565837_4
tgatcttattgaagaaacttgaaggatcccacttttttttgttttgttttgcatgctgtgtcatcaacttaattgttaaygaccgttaacaattacttcttaaatgctgggttcagagaaaaaggagagtctttcctagcttaatgattacctctttatcatcatctgtggatctgaggaaatacttgagtcttcaactagtttcttggtaaagcactacagattagctgccctcaagaatccaaagagctaaatttattctcaacacagaaaaggtgatgattcaaaataacaagaaargaattgaaaataatgaagggaggttattacttcccttttttaaagaggttggacagtatgatattattaaaaataaagaaaatagaagtgaatagaatgtagttgaagttgtagacctgttcaaatacttctttaaaggaaaaaaaagaagtcagaatgtatgatcagctttcaaaaggctccragagtttggatatttgtcattaagttcatagatttgaaggagtgagtaatctataactatgcatattctcaatgtagcttaaaaaa

SEQ ID NO: 95249 - DNA, 386 bp, Chicken  19866894565837_5
cttgagtcttcaactagtttcttggtaaagcactacagattagctgccctcaagaatccaaagagctaaatttattctcaacacagaaaaggtgatgattcaaaataacaagaaargaattgaaaataatgaagggaggttattacttcccttttttaaagaggttggacagtatgatattattaaaaataaagaaaatagaagtgaatagaatgtagttgaagttgtagacctgttcaaatacttctttaaaggaaaaaaaagaagtcagaatgtatgatcagctttcaaaaggctccragagtttggatatttgtcattaagttcatagatttgaaggagtgagtaatctataactatgcatattctcaatgtagcttaaaaaa

SEQ ID NO: 95250 - DNA, 504 bp, Chicken  19866894565843_1
aaaaacaaaaccaaaactggaaaaaaaaagaatgagaagcatgggcagcacccagctggtgatacccagcctgcaaccccaatgtcccacatcccatccccatgcccccagtgctgccggagggcccgcgcccatccttctgcctcctaacgtccctctgccctgttctcacattcaccacctgacatttggagctatgtaaacatgcccaggcgcagatggctccctgcttttttccattcggtgacacctcgagcatctctttcgcaccagtgcgtcatgaccgtgccctacttcctrtcccccagctcactccaagtcacaccataggactgttttcttgttgaggaaccccagggctcatcctcagagtgagagaccagaggacagcggggtggaggacttccaggggctctggaatgtcccatgggcatgaagacctccaagaggccaccaactgtcccctgcgtcctccacttcatttcagaaacagcaactcaacca

SEQ ID NO: 95251 - DNA, 600 bp, Chicken  19866894565845_1
aattccattgtccacaaccagacaaatgctaattcgtcagaccaactgcagcctccaatgttccattcacagagcaccatgggtgtattacagagctcttcagttcctcaagaccagcagtctgccaacatgttccttccccagagttcaataagcaacccagcaactcaagaagagcagatgtcattctttacaaacccaagttccatttctcctcttcaggcagcagcaaacactgagcaaccaacttctttccaacaacagacacagatatctcatatccagagttctatgcttccscaggaacagcctcagactcagcctgctcagcaaggtttgtttcagccacaagtacctttaggttccatccagtccagttcaattccccagaaccaacaaggagctatcttccagcctcagcattcaatagttgctattcagagcagtcctccatctcaagagcagccacagcagcagcaacagaacatgatgttcagtaatcaaaatgcaatgagtacaattgcttctcaaaagcaaaacatgatttttaacccaaaccaaaaccccgttactaatcaggaacagcaaggccagtccatt

SEQ ID NO: 95252 - DNA, 584 bp, Chicken  19866894565850_1
cccctaaaagtctttgtctgggggaaaccttcaccactgtcacccaaagggcagaggagctcacgcgctgcttctgcatcgtttccttcttgcaaagagatcagcttgaggaatccacaagaaatcgagaattcctcttctctcgttaccaaatgtcagcaccgctgctccttctgccgcgtcttcggacaccgaagctctgaggcccccaaccccaaactgaccgaggtggggggaggcaatgaccatgtcgggaaagcagcggctccgcaaagcggcccgagggggggttagcgggargggggtttgaagcctcatccccacctgtggatgcgtctgtggctgggtgggctgcggccagagtggggagaggggcagagccggctcggcaacggcgactcctgaggaaaagcccttgaagaacttttccccccgcaaacaccgctcctttcagctcaggaggtccgtggggtctctatgggatcctgccccgctgtgtcccacagcaaaaagggtaaaaatcagagcgaagctgcgggtccggcctcggcttttctcgttcgctgctgctgaaaatcttggag

SEQ ID NO: 95253 - DNA, 599 bp, Chicken  19866894565853_1
  misc_feature (1)..(66): n is any nucleotide
nnnnnnnnnnnnnnnnnnnnnnnnnnnnnnnnnnnnnnnnnnnnnnnnnnnnnnnnnnnnnnnnnnggtgcctgggatacctgcagcttataataaacccctgtcacaaaaaacaatcactatgtcaaacagcggcagctgcacaaattccctgttcaaaaggcaatcttcacatgccacaaacgagcaggaacatactgctgcctcacagttacatgggatacttccatcctacagcacaaacgactgtacagacacttgcaatttacagaatgaatttccccctcgtaagatgaagaytgtccccgaacacaacctggggcgactacctatacctgaagttcaaactgctatatcctatcatcttccttttccatattattttgcacatgacatttcccaaacagcaagatgggcaattcatcccgtttacagcaaagttgactcgagggaacctgaataaactgggaaccatttaggagacatgtttcctaagattgcgaagttaacttggtgatagtaggttcaacatctctatattaaggcctgagaaaacaagcaattactgtctttttaattagttactgttttgtagatgc

SEQ ID NO: 95254 - DNA, 599 bp, Chicken  19866894565860_1
  misc_feature (1)..(123): n is any nucleotide
nnnnnnnnnnnnnnnnnnnnnnnnnnnnnnnnnnnnnnnnnnnnnnnnnnnnnnnnnnnnnnnnnnnnnnnnnnnnnnnnnnnnnnnnnnnnnnnnnnnnnnnnnnnnnnnnnnnnnnnnnnntgatgggcacggtcctgaaagctctgagcgtggcttggtttgttggactaacactgcactgccctttaaagcacatggctttctcaggctctcccatttgtgcgttattcacatattttcagtaatttaaggaaactcatcactggataataaatccatcagtgggcaataaatccygtgtttacaaggtattgaatcgggaagagacgcgccagcccagcttttaaataagccagcggtcacctgaaatctgtctggaagtctgaaaaagagcacagcaaatttttttttgcagttaattgtggaaatgttttcttgttgttgagggcaggcagatgattgcagtgctctgttacactctgggctgtatctgctcctttatcgctcggtgctcccacagctgagttgttgggcactcgagatacctcctgtgtgttgcctgtctggatggttctactccgaatctgagttcagaa

SEQ ID NO: 95255 - DNA, 600 bp, Chicken  19866894565871_1
tttctgctcctcttgcagctatgtggcagatacagatgttgcccaaaactcagagttctgaaaactagaacttacagtccatgaaaaactatgatgatattcatagtctctgtcaaggaaatgatagaataaaagccctcaaagtttcagatgaaaatgcctttcagctatgactgctgtaaaatttaacacagccctaaaagagtgcatggatgcctgttgcaaaaactgaaagttcccagaaaaaattctggctgctgggttacagaacaataatcctttgcaatgcactgctgaagmtgataggcagtcagtgttgccatyagagatttaaaaagtatgatttatcctctttcaggtaagacaaattttaaagaaaaytaagtttatctgatgtttaaatcacatttaattttctttccttccttttttcttccaaaatkttctttgttctaacatactgttttctcctccaattcttttaactgatatttttttatgctctcatctactcagatggttatccagtggctcttttacacagttttccactctgacctgtcttgcttccattaatcacttatgtatttgaacatggtt

SEQ ID NO: 95256 - DNA, 600 bp, Chicken  19866894565871_2
ggcagatacagatgttgcccaaaactcagagttctgaaaactagaacttacagtccatgaaaaactatgatgatattcatagtctctgtcaaggaaatgatagaataaaagccctcaaagtttcagatgaaaatgcctttcagctatgactgctgtaaaatttaacacagccctaaaagagtgcatggatgcctgttgcaaaaactgaaagttcccagaaaaaattctggctgctgggttacagaacaataatcctttgcaatgcactgctgaagmtgataggcagtcagtgttgccatyagagatttaaaaagtatgatttatcctctttcaggtaagacaaattttaaagaaaaytaagtttatctgatgtttaaatcacatttaattttctttccttccttttttcttccaaaatkttctttgttctaacatactgttttctcctccaattcttttaactgatatttttttatgctctcatctactcagatggttatccagtggctcttttacacagttttccactctgacctgtcttgcttccattaatcacttatgtatttgaacatggttctatgatttgaaaatatttcatat

SEQ ID NO: 95257 - DNA, 600 bp, Chicken  19866894565871_3
tgaaaaactatgatgatattcatagtctctgtcaaggaaatgatagaataaaagccctcaaagtttcagatgaaaatgcctttcagctatgactgctgtaaaatttaacacagccctaaaagagtgcatggatgcctgttgcaaaaactgaaagttcccagaaaaaattctggctgctgggttacagaacaataatcctttgcaatgcactgctgaagmtgataggcagtcagtgttgccatyagagatttaaaaagtatgatttatcctctttcaggtaagacaaattttaaagaaaaytaagtttatctgatgtttaaatcacatttaattttctttccttccttttttcttccaaaatkttctttgttctaacatactgttttctcctccaattcttttaactgatatttttttatgctctcatctactcagatggttatccagtggctcttttacacagttttccactctgacctgtcttgcttccattaatcacttatgtatttgaacatggttctatgatttgaaaatatttcatatttcagaagcaggatgaatggagcttgattatgaaatatcagtatctataagagatcc

SEQ ID NO: 95258 - DNA, 600 bp, Chicken  19866894565871_4
gtttcagatgaaaatgcctttcagctatgactgctgtaaaatttaacacagccctaaaagagtgcatggatgcctgttgcaaaaactgaaagttcccagaaaaaattctggctgctgggttacagaacaataatcctttgcaatgcactgctgaagmtgataggcagtcagtgttgccatyagagatttaaaaagtatgatttatcctctttcaggtaagacaaattttaaagaaaaytaagtttatctgatgtttaaatcacatttaattttctttccttccttttttcttccaaaatkttctttgttctaacatactgttttctcctccaattcttttaactgatatttttttatgctctcatctactcagatggttatccagtggctcttttacacagttttccactctgacctgtcttgcttccattaatcacttatgtatttgaacatggttctatgatttgaaaatatttcatatttcagaagcaggatgaatggagcttgattatgaaatatcagtatctataagagatccaacaataacctaaagagaatccattcactgtatagattaggaggtaaaaaaaaaaagggggg

SEQ ID NO: 95259 - DNA, 599 bp, Chicken  19866894565877_1
  misc_feature (1)..(199): n is any nucleotide
nnnnnnnnnnnnnnnnnnnnnnnnnnnnnnnnnnnnnnnnnnnnnnnnnnnnnnnnnnnnnnnnnnnnnnnnnnnnnnnnnnnnnnnnnnnnnnnnnnnnnnnnnnnnnnnnnnnnnnnnnnnnnnnnnnnnnnnnnnnnnnnnnnnnnnnnnnnnnnnnnnnnnnnnnnnnnnnnnnnnnnnnnnnnnnnnnnnnnnnccagtaaaaaggaggagaaagctgcttccctgagtgaggacatagcaaagcatggaaataagcaaagcatctttttcaaagttatagaggtggacacttcracttcatcacttgtgaaatgtgtatacccaagataccaggaaaattcccaccgtgaaaggcagcggctgcttttgtagcaacgtgtgaaatttacaccagctgaagatccggtgcttgttgttgaatttattgagcttgaaccaaatcccactgtaaccaatggggaaaaaaaaaaacaccagaaaaaaaaaaaaagacttcgtttcagttccttgcagagcaggcttgctgtttgtggacccctttgggccatgtgacatggatatcaacagctttgaaaccatgaccatctgattaa

SEQ ID NO: 95260 - DNA, 599 bp, Chicken  19866894565891_1
  misc_feature (1)..(113): n is any nucleotide
nnnnnnnnnnnnnnnnnnnnnnnnnnnnnnnnnnnnnnnnnnnnnnnnnnnnnnnnnnnnnnnnnnnnnnnnnnnnnnnnnnnnnnnnnnnnnnnnnnnnnnnnnnnnnnnnnagcgccttgtttcacagaagtgactaagctggcccattgccttcgacacagaggcatagcagagggaaatgtaggcctgaagttactggttggtgaacaagtgcaggggtgaaacacaagccaggagagcagacacttacagcttctgtatctctgccctctcttcagtatagtttgaggtaaaacrctgtcaaaatttagtcttatttttacaagctttgctgcttctgaaaactatcatttactttgtcgagatgtcagatctttaacttcattgcttttcagaacataatctctctttatatttctatcttccaaactaaaaacatttcgaaacagaatcaagcgtaagtgaagtaggactgaaggttactcctgcagggaaaacagcctcgtgagccagttgaaatatgtgacgcaaccaccaggcacagccttgtgattcccattctattcacttaagcataatggaaagtttaaaattta

SEQ ID NO: 95261 - DNA, 600 bp, Chicken  19866894565891_2
ctgcttctgaaaactatcatttactttgtcgagatgtcagatctttaacttcattgcttttcagaacataatctctctttatatttctatcttccaaactaaaaacatttcgaaacagaatcaagcgtaagtgaagtaggactgaaggttactcctgcagggaaaacagcctcgtgagccagttgaaatatgtgacgcaaccaccaggcacagccttgtgattcccattctattcacttaagcataatggaaagtttaaaatttatcatcttccacagtgttgtaatattctgtcaattytgtagcattaatcttrctgcagagctttttataacatacaatcacttaaaacagtgtcacagcctactgtttaatgcacataaaggtacatttcattaacactactcygtgaggttttactaggacaaatatataagttagaaaaaaaacctgaacatctgtatrtaatagtatttcaaaatcttttacgccaataaaacttaagagttgcatttgaacgcttttatttttttctttatctacaggattctagaatgtaatgctgggacagaaacctcccagatttgcacaatctaatgg

SEQ ID NO: 95262 - DNA, 600 bp, Chicken  19866894565891_3
tcatttactttgtcgagatgtcagatctttaacttcattgcttttcagaacataatctctctttatatttctatcttccaaactaaaaacatttcgaaacagaatcaagcgtaagtgaagtaggactgaaggttactcctgcagggaaaacagcctcgtgagccagttgaaatatgtgacgcaaccaccaggcacagccttgtgattcccattctattcacttaagcataatggaaagtttaaaatttatcatcttccacagtgttgtaatattctgtcaattytgtagcattaatcttrctgcagagctttttataacatacaatcacttaaaacagtgtcacagcctactgtttaatgcacataaaggtacatttcattaacactactcygtgaggttttactaggacaaatatataagttagaaaaaaaacctgaacatctgtatrtaatagtatttcaaaatcttttacgccaataaaacttaagagttgcatttgaacgcttttatttttttctttatctacaggattctagaatgtaatgctgggacagaaacctcccagatttgcacaatctaatggaacagttctcaaaagg

SEQ ID NO: 95263 - DNA, 600 bp, Chicken  19866894565891_4
ttcgaaacagaatcaagcgtaagtgaagtaggactgaaggttactcctgcagggaaaacagcctcgtgagccagttgaaatatgtgacgcaaccaccaggcacagccttgtgattcccattctattcacttaagcataatggaaagtttaaaatttatcatcttccacagtgttgtaatattctgtcaattytgtagcattaatcttrctgcagagctttttataacatacaatcacttaaaacagtgtcacagcctactgtttaatgcacataaaggtacatttcattaacactactcygtgaggttttactaggacaaatatataagttagaaaaaaaacctgaacatctgtatrtaatagtatttcaaaatcttttacgccaataaaacttaagagttgcatttgaacgcttttatttttttctttatctacaggattctagaatgtaatgctgggacagaaacctcccagatttgcacaatctaatggaacagttctcaaaagggaacaaattttatttattcatttgtttgtttgttttttgcagttccattacctttaattggctccccaccataaatttctcagttgtgagct

SEQ ID NO: 95264 - DNA, 600 bp, Chicken  19866894565891_5
acagcctcgtgagccagttgaaatatgtgacgcaaccaccaggcacagccttgtgattcccattctattcacttaagcataatggaaagtttaaaatttatcatcttccacagtgttgtaatattctgtcaattytgtagcattaatcttrctgcagagctttttataacatacaatcacttaaaacagtgtcacagcctactgtttaatgcacataaaggtacatttcattaacactactcygtgaggttttactaggacaaatatataagttagaaaaaaaacctgaacatctgtatrtaatagtatttcaaaatcttttacgccaataaaacttaagagttgcatttgaacgcttttatttttttctttatctacaggattctagaatgtaatgctgggacagaaacctcccagatttgcacaatctaatggaacagttctcaaaagggaacaaattttatttattcatttgtttgtttgttttttgcagttccattacctttaattggctccccaccataaatttctcagttgtgagctacagtgcatactacttaatcactgatgtttttacctgaggaaagcttggtctgccct

SEQ ID NO: 95265 - DNA, 600 bp, Chicken  19866894565899_1
cgacattatttctccagcagatacagtgttttatgcatgtgtctgggaattgtgtttccctttgatttattagctaagcacagaggttttgtcctcttattgctatctttattcagacaagtcttggcacatttcagcaattccagctctacatgttctattatggctacagctcatttaagtctgttttctttggcaccttgtttgtttcagctaattacttttgcaataactatttttatttttttcaaaattcattttttctgagctagtttatgtggttttatatcctcgttggtytcccaaatgcagtttctcagctgtgcaygtttagtttgttcttaggtaattacaggagaccttcataaaaagaatcacaaacatatgggtggattgtaggtggaatatacctgtaagagttcagagcaacacagatgtggatacctggttttagatcttagttggcagagggcggtcttagtgctacatcataacaaaagattggactagacacttccttggtatttgttgtgaacaaackttttcttcttgttaattatctgccaaaatttaagagaagcacattcttctattcttgtc

SEQ ID NO: 95266 - DNA, 600 bp, Chicken  19866894565899_2
ttttatgcatgtgtctgggaattgtgtttccctttgatttattagctaagcacagaggttttgtcctcttattgctatctttattcagacaagtcttggcacatttcagcaattccagctctacatgttctattatggctacagctcatttaagtctgttttctttggcaccttgtttgtttcagctaattacttttgcaataactatttttatttttttcaaaattcattttttctgagctagtttatgtggttttatatcctcgttggtytcccaaatgcagtttctcagctgtgcaygtttagtttgttcttaggtaattacaggagaccttcataaaaagaatcacaaacatatgggtggattgtaggtggaatatacctgtaagagttcagagcaacacagatgtggatacctggttttagatcttagttggcagagggcggtcttagtgctacatcataacaaaagattggactagacacttccttggtatttgttgtgaacaaackttttcttcttgttaattatctgccaaaatttaagagaagcacattcttctattcttgtcccaaaagataacttcacagcttgctttc

SEQ ID NO: 95267 - DNA, 523 bp, Chicken  19866894565899_3
tttttttcaaaattcattttttctgagctagtttatgtggttttatatcctcgttggtytcccaaatgcagtttctcagctgtgcaygtttagtttgttcttaggtaattacaggagaccttcataaaaagaatcacaaacatatgggtggattgtaggtggaatatacctgtaagagttcagagcaacacagatgtggatacctggttttagatcttagttggcagagggcggtcttagtgctacatcataacaaaagattggactagacacttccttggtatttgttgtgaacaaackttttcttcttgttaattatctgccaaaatttaagagaagcacattcttctattcttgtcccaaaagataacttcacagcttgctttcctaatgggcaaataaaatgaattcttgtagtgactcctagatggatcacagttactttttcagttcccaaacttcgcttttttgtctcttaccaaaagaataaaccaactgcagatccaattaaggatattcacag

SEQ ID NO: 95268 - DNA, 592 bp, Chicken  19866894565901_1
tcattaagctgcaggaaattaaacacaaacacaattcatgtcaaaccttaccaaagcaagttagatgctgaatgaaagttaccactgcattcttattaaaccttgccaatgctttttcaatttataaaatgcagacttatgtttattctgtaccttagcacactgacttcataatgaatagagtatgaaataacagatggccatttattgtagaacactacttgaactcagtatcaggaagcaggctttgctcagaatcctctgattaatgatgtgactcacatcttcaacattttttayacaaaagttggttcattaaactgtatatttttcatcaattttgtgaaaargaaaaaaaattgtacaaacaatggcttttcagcattaccaataatgaccaaagaacccacaaaatgtccaaaatgcactacaaataaagcaggtggttttttgtagactaaacaatcaactgagaacatcttggtgcttataaaagaattacagcacttacatattcatcaataggatctcccacagtgggtgaatagatgattctgtactgctggactggcccatcagcatggtcccattg

SEQ ID NO: 95269 - DNA, 542 bp, Chicken  19866894565901_2
ccaaagcaagttagatgctgaatgaaagttaccactgcattcttattaaaccttgccaatgctttttcaatttataaaatgcagacttatgtttattctgtaccttagcacactgacttcataatgaatagagtatgaaataacagatggccatttattgtagaacactacttgaactcagtatcaggaagcaggctttgctcagaatcctctgattaatgatgtgactcacatcttcaacattttttayacaaaagttggttcattaaactgtatatttttcatcaattttgtgaaaargaaaaaaaattgtacaaacaatggcttttcagcattaccaataatgaccaaagaacccacaaaatgtccaaaatgcactacaaataaagcaggtggttttttgtagactaaacaatcaactgagaacatcttggtgcttataaaagaattacagcacttacatattcatcaataggatctcccacagtgggtgaatagatgattctgtactgctggactggcccatcagcatggtcccattg

SEQ ID NO: 95270 - DNA, 600 bp, Chicken  19866894565907_1
tcaaatttacttttttttttttttttttgtgaagtgaggcaatacagacccatgcttagtacataattatttaatatatcctactatttcatggtgcaactctgacctgtaactgagatttaatgaagtgctttggcagagaattaatattagaagaaacacaaacctgtgactcttaagtctcacttcatccaattatagtttgttcttaagttacataatctattttacagcttttggtataggaaaagagtgatctctcacagcattttaatgaggaccagtttttatctcaagccrtcttagtcttttgcaaatattgaggaatgttrtatctgataaaatttactaaggtatcttaatgatatagaactctaaacaacagtttcaaaattggccatgtctctaaatgtgcatggacacgtgaatcccatttattgaaggtgacaaaccaatgaactgaaaattaaatacatggctattaggtgctctaatcctagagagctccttgagcagtttgtatttggttgacaaaagaagctatgtaagaaatagaagtgaattcacgcttccaattgcacactaagcgatgagaaagta

SEQ ID NO: 95271 - DNA, 600 bp, Chicken  19866894565907_2
agtgaggcaatacagacccatgcttagtacataattatttaatatatcctactatttcatggtgcaactctgacctgtaactgagatttaatgaagtgctttggcagagaattaatattagaagaaacacaaacctgtgactcttaagtctcacttcatccaattatagtttgttcttaagttacataatctattttacagcttttggtataggaaaagagtgatctctcacagcattttaatgaggaccagtttttatctcaagccrtcttagtcttttgcaaatattgaggaatgttrtatctgataaaatttactaaggtatcttaatgatatagaactctaaacaacagtttcaaaattggccatgtctctaaatgtgcatggacacgtgaatcccatttattgaaggtgacaaaccaatgaactgaaaattaaatacatggctattaggtgctctaatcctagagagctccttgagcagtttgtatttggttgacaaaagaagctatgtaagaaatagaagtgaattcacgcttccaattgcacactaagcgatgagaaagtaggaaacactgtacagagataaccaaatttccc

SEQ ID NO: 95272 - DNA, 600 bp, Chicken  19866894565909_1
gtggttggaggagatctggtgctgttcctgccacacacttcctatggaatgctactccaatggcctaaatccagtgaggctgtcagtagcagcttgggatcactgggtctatttgggctgaatgttcgcatgttgagtggagaatgtgactgtcctagtaaccgaagcagtgccagggcccattttccagccctgggccagttggcacagcaatgccttgtctgtaacacttgattgtctcaacatctggaacaggctgagctgcatccaaaccgacagctcagaatggtgctgaacctygaaccatgggaaggtgctgattgtccggggacaacatcattcctggggccattctacaagctgaagaatttagatgactgcattccagtgattgaaggtgttctctggctttgtttgatttactaacagaggcaattgtaggatgggatttgcttaatcaaatatgaatgcccacacakgagacagttttctgggcctaccttcttgtcgccagaagaagcacttgagcataatttctctcaccatttctctcattcactcgtcattgtaagtatctgagaagggccacatgcactgcac

SEQ ID NO: 95273 - DNA, 600 bp, Chicken  19866894565909_2
ccattttccagccctgggccagttggcacagcaatgccttgtctgtaacacttgattgtctcaacatctggaacaggctgagctgcatccaaaccgacagctcagaatggtgctgaacctygaaccatgggaaggtgctgattgtccggggacaacatcattcctggggccattctacaagctgaagaatttagatgactgcattccagtgattgaaggtgttctctggctttgtttgatttactaacagaggcaattgtaggatgggatttgcttaatcaaatatgaatgcccacacakgagacagttttctgggcctaccttcttgtcgccagaagaagcacttgagcataatttctctcaccatttctctcattcactcgtcattgtaagtatctgagaagggccacatgcactgcactacaaaaactgcattaggtaacagtgactgtgagaggagtccagagatgctgggtcaccacctttagatcaatgtagatcacccagggtaaatatattccaaatctatgtcttgtagtcattggtaaaaacaaaactgggcaaaagtctgcagcakaacaaaatattcagtcttaaact

SEQ ID NO: 95274 - DNA, 469 bp, Chicken  19866894565909_3
atcaaatatgaatgcccacacakgagacagttttctgggcctaccttcttgtcgccagaagaagcacttgagcataatttctctcaccatttctctcattcactcgtcattgtaagtatctgagaagggccacatgcactgcactacaaaaactgcattaggtaacagtgactgtgagaggagtccagagatgctgggtcaccacctttagatcaatgtagatcacccagggtaaatatattccaaatctatgtcttgtagtcattggtaaaaacaaaactgggcaaaagtctgcagcakaacaaaatattcagtcttaaactgaagcttttacctacttaagcagtcctgggaccatcctttctcacacttctttaaatgtctgttttcctgcccttcctcagcatttatcttctgtctgctttcttatggtgtgactgagtctgtgcacccctcagtgcagcggggc

SEQ ID NO: 95275 - DNA, 600 bp, Chicken  19866894565920_1
tttaaaccagcttatttttttgttcacagtaaaggcgctgtagggtcttgttagttacatgttgctgagtaggaacattgaaatgttggagaaatgaaataaaaagctgcataaatgtcatttaggaatttcaatgtaattttcttttcttgttctgcaaacaattattcacagctcatagatctagtacacttagactgaacacttcattgaaaatctcatctctttagaaaacctatatccattctgataaggttcagttcactaattttagctttttttttcctttcttttttttckttttttttttaatgccctgttttaaagactgagaattcgtggagcaataaagcgaagagcatttgtcaacaacaaaagccacaaagacgtccctgctctgaacttctcaaatatctgactacgaacgatgaccctcctcagaccaaaccagcagagaacaggaacagcagcaaagagaaatgcacctccaaaaggaagccccatctgcagtctcagacaaatcacctgcaagggtaggtgtgggagcacagaacatcctgttggttttggagggaaggtgagatacaatgcttgtgaata

SEQ ID NO: 95276 - DNA, 600 bp, Chicken  19866894565920_2
ttaaaccagcttatttttttgttcacagtaaaggcgctgtagggtcttgttagttacatgttgctgagtaggaacattgaaatgttggagaaatgaaataaaaagctgcataaatgtcatttaggaatttcaatgtaattttcttttcttgttctgcaaacaattattcacagctcatagatctagtacacttagactgaacacttcattgaaaatctcatctctttagaaaacctatatccattctgataaggttcagttcactaattttagctttttttttcctttcttttttttctktttttttttaatgccctgttttaaagactgagaattcgtggagcaataaagcgaagagcatttgtcaacaacaaaagccacaaagacgtccctgctctgaacttctcaaatatctgactacgaacgatgaccctcctcagaccaaaccagcagagaacaggaacagcagcaaagagaaatgcacctccaaaaggaagccccatctgcagtctcagacaaatcacctgcaagggtaggtgtgggagcacagaacatcctgttggttttggagggaaggtgagatacaatgcttgtgaatac

SEQ ID NO: 95277 - DNA, 552 bp, Chicken  19866894565923_1
ttgaattgcaataggagctgggcattaacttccccatactgtttgaaagtgtcaatctttattaaaacacggctcaacttcagaacaccctggagatgtgctgagctttactcgcctgcttccaactgctcaactacagcatgaaagggaaccttgggggcaattttctgaagtaccttttagggctattacatgggaaataattggcagcttacaatgaaggcagagagctgctgagttacatgataaggatagctgtcagaagacgctcttttaacccagaactccacagggcattcrtatttttcctgatgatgtaacaagctacagtgagcacattttggcaattaaaatttattcccaaattggcaacgactagagatagtttcttagattgagtagaaaggggctgggatctcctttggcctattctagtttaggcctcgtgtgataggaatatgtctgacttacaaaatagaataaaatgttcactaaagtgaaattgttatttttttttttttaacaaaaaatgctgcttctattatataggat

SEQ ID NO: 95278 - DNA, 600 bp, Chicken  19866894565924_1
tctttgttactttaacaagtaacagtactgcagcaataaatacatctgtacatcacaggttgttaactttatatagaacttttcccagtgcttctttgtctcaaattctccactttataacctgatacaaagaacaaatataatacttacaaaacaggcttccaaattcagtcagtaacaagcttttcaaacctccagctgttactatcttttattaaaaggaaaaccctactcttaggtgtttttaggaggtaggaatagaaaatagcatcagcttaaaacttctgagcgtgctactaycatctaaattacactgtaaaaagacaggaagctacctgagcaagcttctgccaagagatactgtactaagtgctatctttgattttaagattgttaggagttctacacagcaactagatacaaagctatttcttaccgctttacagtgtagtttaggaagcacataactacactacagaaacatgaaattatttttaaaaataacaatttaagcctctaagactgccaatagcatctaaaatctaggatatggtttcatctcattgaatgctgcagtatgtctgaaataagtcagacaca

SEQ ID NO: 95279 - DNA, 407 bp, Chicken  19866894565932_1
gtatttacttacttcaaactaatgctctgctaaattatgttgcttcaactcttaataattttctgaattatgtgttttgagaaacaaacaaacaacacaccaatccttttctgttttgtttgagcagtatgatggaaaaatactttaaaaacaagaatatcttcatgtattttcagtgggccccctttttttcctaaaaactgtgtgcttgcacttatataagctgagttgggactaacagaatgaagtcacattaatacagctgtagtcttctaatgcttataatgaggagaatcggarctcacaggtataaataccttattgctctctataagtatctgaagggaggttgtagtgagctgggggttggactcttctctcatgtaactagtgataggactagaagg

SEQ ID NO: 95280 - DNA, 599 bp, Chicken  19866894565938_1
  misc_feature (1)..(106): n is any nucleotide
nnnnnnnnnnnnnnnnnnnnnnnnnnnnnnnnnnnnnnnnnnnnnnnnnnnnnnnnnnnnnnnnnnnnnnnnnnnnnnnnnnnnnnnnnnnnnnnnnnnnnnnnnnccttctgtgacagagtgacggcatcaatagataaaagaagacctgttcatgtaatctgcctggacttttgcaaggcctttgatatggtcccacatcagaatcttatctctatattggaaaaatatgaatttgatgggtgaactatttggtgaataaataattagttggatggtcataaccagagtgttgttatyagcagctccttgtccaggtgaaggccagtcctgtgtgatgtcctcctaggggcccagtgctcttcaacatctttatcaatgacctggatagtaggattgrgtgtaccctcagcaaatttgctgatgacactgagtagtgcagttaatgcaataggaggacaggatgccatcaagarggacttggaaaagcttgaaaagtgggcctgtgagaacctaatgagattcctaaaggccaagtgtatggtatagcacttgagttgggtaaatcccagctatgtgaacagacctggaaaaataat

SEQ ID NO: 95281 - DNA, 599 bp, Chicken  19866894565938_2
  misc_feature (1)..(6): n is any nucleotide
nnnnnnccttctgtgacagagtgacggcatcaatagataaaagaagacctgttcatgtaatctgcctggacttttgcaaggcctttgatatggtcccacatcagaatcttatctctatattggaaaaatatgaatttgatgggtgaactatttggtgaataaataattagttggatggtcataaccagagtgttgttatyagcagctccttgtccaggtgaaggccagtcctgtgtgatgtcctcctaggggcccagtgctcttcaacatctttatcaatgacctggatagtaggattgrgtgtaccctcagcaaatttgctgatgacactgagtagtgcagttaatgcaataggaggacaggatgccatcaagarggacttggaaaagcttgaaaagtgggcctgtgagaacctaatgagattcctaaaggccaagtgtatggtatagcacttgagttgggtaaatcccagctatgtgaacagacctggaaaaataattcattgagagcagccatgtggaggacttggtggttctggtggatgaaaagccttatgcaaggtagcagggagcacctgaagcccagaaggcaaactgcat

SEQ ID NO: 95282 - DNA, 600 bp, Chicken  19866894565938_3
caaggcctttgatatggtcccacatcagaatcttatctctatattggaaaaatatgaatttgatgggtgaactatttggtgaataaataattagttggatggtcataaccagagtgttgttatyagcagctccttgtccaggtgaaggccagtcctgtgtgatgtcctcctaggggcccagtgctcttcaacatctttatcaatgacctggatagtaggattgrgtgtaccctcagcaaatttgctgatgacactgagtagtgcagttaatgcaataggaggacaggatgccatcaagarggacttggaaaagcttgaaaagtgggcctgtgagaacctaatgagattcctaaaggccaagtgtatggtatagcacttgagttgggtaaatcccagctatgtgaacagacctggaaaaataattcattgagagcagccatgtggaggacttggtggttctggtggatgaaaagccttatgcaaggtagcagggagcacctgaagcccagaaggcaaactgcatcctgggctgcaacaaaacaggagtggcagcagggygagagggaggattgccccccctgcaggcctatctaggcttgg

SEQ ID NO: 95283 - DNA, 600 bp, Chicken  19866894565938_4
tagtgcagttaatgcaataggaggacaggatgccatcaagarggacttggaaaagcttgaaaagtgggcctgtgagaacctaatgagattcctaaaggccaagtgtatggtatagcacttgagttgggtaaatcccagctatgtgaacagacctggaaaaataattcattgagagcagccatgtggaggacttggtggttctggtggatgaaaagccttatgcaaggtagcagggagcacctgaagcccagaaggcaaactgcatcctgggctgcaacaaaacaggagtggcagcagggygagagggaggattgccccccctgcaggcctatctaggcttgggccccctccacaggaaagacgtgcagcagttggagcaggtccagaggagggcggtgaagatggtcagmgggctggagcagttctcctacgaagagaagttgaaggagttggacctgttcagcctggagaagagtaagttccgaggagacatcactacggccttctggcacttgaggtgaactaatatacaggagggaaaacaactttttacacagtctgatagtgataggacaagggggagtgattttaaactaaaag

SEQ ID NO: 95284 - DNA, 600 bp, Chicken  19866894565938_5
tatagcacttgagttgggtaaatcccagctatgtgaacagacctggaaaaataattcattgagagcagccatgtggaggacttggtggttctggtggatgaaaagccttatgcaaggtagcagggagcacctgaagcccagaaggcaaactgcatcctgggctgcaacaaaacaggagtggcagcagggygagagggaggattgccccccctgcaggcctatctaggcttgggccccctccacaggaaagacgtgcagcagttggagcaggtccagaggagggcggtgaagatggtcagmgggctggagcagttctcctacgaagagaagttgaaggagttggacctgttcagcctggagaagagtaagttccgaggagacatcactacggccttctggcacttgaggtgaactaatatacaggagggaaaacaactttttacacagtctgatagtgataggacaagggggagtgattttaaactaaaagaagggagatttaaatgggatatgtggaagaaagtttcttcctgaaagagtggtgagacactggcacaggatgctcagggaagctgtggatgccttgtctctggaggcatt

SEQ ID NO: 95285 - DNA, 600 bp, Chicken  19866894565939_1
tataatgcagacactgaaaatagcactggctgcaagtgctttttgaaggcaaatgtaagggaactgcaccatttagtgccatctagggcaggaaatattaactcaggtgtagatcaggttgtgatggcagaggagattcttctgtttaaaaactgttttaaaaacagcataacaccatgaaataaaactgtgtgagaaagggaatacaagatcaactagatcttgaattagacacgagattgagaactgtatttctagcaggagtaagccatcggacaagcaatacccagagatacacgyttgaaagtagattaaaaaagaagtgaacttttcagtaaacctcactaagatgacgatgaattacaaggtgtcaagggaggactggaaaagagaaactaagagcttgggttatgggcacaaacagaaccagctagtcatacaagacatgccgcagtgaagacagatggtgaggaaggcgtgtgtccagaacataggatgcagaggactggtcctacttattagtggatgtctccaagactcacatgacagagaggactatgctggcagcaccaacaccaaatgctctgcaagaagcatgat

SEQ ID NO: 95286 - DNA, 600 bp, Chicken  19866894565940_1
ttaaacatacaaaggttaagtcttctttttctcatgaaaaacattcttagtgtaatgccataaatgtttagttttttaaacaattttggtgaagaaactattaaccatattaacctcagcacagattaacgcctacttccgcactacctttccgtttacttcctactaaatcaagatgagaaagaaaacaatacttatctgactcacttaatggattgtgaggagcagggtatttttttccttttgccgtcttctggaacatcaatctaataagacaacaaaataagtaaaatcttcaakttaaagcttatggcaatrtaactgccataaatrctgaacttgttaaaatcatctatttctccattaagcatcaactccttttgtaacttccatgtgatgctacatagtcattgaaacgttctgatatctgacaacgttaatgtggattctggctttgcatgtctgatttttcaatctcacgcatacttcatgttttttgtttttattagcctgctctaataaactggcttgcggcccggctgattgacagaaaatgggactggatgctacaacgtgttgttgcacttagctccaaacttt

SEQ ID NO: 95287 - DNA, 600 bp, Chicken  19866894565940_2
agtcttctttttctcatgaaaaacattcttagtgtaatgccataaatgtttagttttttaaacaattttggtgaagaaactattaaccatattaacctcagcacagattaacgcctacttccgcactacctttccgtttacttcctactaaatcaagatgagaaagaaaacaatacttatctgactcacttaatggattgtgaggagcagggtatttttttccttttgccgtcttctggaacatcaatctaataagacaacaaaataagtaaaatcttcaakttaaagcttatggcaatrtaactgccataaatrctgaacttgttaaaatcatctatttctccattaagcatcaactccttttgtaacttccatgtgatgctacatagtcattgaaacgttctgatatctgacaacgttaatgtggattctggctttgcatgtctgatttttcaatctcacgcatacttcatgttttttgtttttattagcctgctctaataaactggcttgcggcccggctgattgacagaaaatgggactggatgctacaacgtgttgttgcacttagctccaaactttcagttagtaattgctctc

SEQ ID NO: 95288 - DNA, 600 bp, Chicken  19866894565940_3
atgaaaaacattcttagtgtaatgccataaatgtttagttttttaaacaattttggtgaagaaactattaaccatattaacctcagcacagattaacgcctacttccgcactacctttccgtttacttcctactaaatcaagatgagaaagaaaacaatacttatctgactcacttaatggattgtgaggagcagggtatttttttccttttgccgtcttctggaacatcaatctaataagacaacaaaataagtaaaatcttcaakttaaagcttatggcaatrtaactgccataaatrctgaacttgttaaaatcatctatttctccattaagcatcaactccttttgtaacttccatgtgatgctacatagtcattgaaacgttctgatatctgacaacgttaatgtggattctggctttgcatgtctgatttttcaatctcacgcatacttcatgttttttgtttttattagcctgctctaataaactggcttgcggcccggctgattgacagaaaatgggactggatgctacaacgtgttgttgcacttagctccaaactttcagttagtaattgctctcttaccatttgctagc

SEQ ID NO: 95289 - DNA, 600 bp, Chicken  19866894565951_1
gctggcacccaggggccctgaatgaccaccagccagccatggtggctgtggcttccggtggctttgcaccaccatcctgcagggccaggtaggctgcacactgctggcccaaccacaggagtccagtatacggcctcttactcttttgttctgcacccaaggagcttctcaaaggtgcttcagtgtgttcagtacttgttatgggggcccatattgccactttattcctagcaatgggcaaaaatatacagcgcttctgcttttgaggatttctcctcatttcctatcaatatctttcayctaccgtaaaagataagtcacagaactctggttgccaagcccctcttttggaagaccaaactgggaagaaaacttactttttgccagtatgtcttgaatgtcagatgctggctgcctgtgcaataacctactgtgaagtaaaaccagactcattacacactattatcattgcttcatttgctgcgtagaaggaccatatgcctcagctacaaacgtmatgcatgacataccctccagccccaaccagtgtcctcctcccccccccccaaaaatgcccccacggcaatcgtgctgttctat

SEQ ID NO: 95290 - DNA, 600 bp, Chicken  19866894565951_2
cactttattcctagcaatgggcaaaaatatacagcgcttctgcttttgaggatttctcctcatttcctatcaatatctttcayctaccgtaaaagataagtcacagaactctggttgccaagcccctcttttggaagaccaaactgggaagaaaacttactttttgccagtatgtcttgaatgtcagatgctggctgcctgtgcaataacctactgtgaagtaaaaccagactcattacacactattatcattgcttcatttgctgcgtagaaggaccatatgcctcagctacaaacgtmatgcatgacataccctccagccccaaccagtgtcctcctcccccccccccaaaaatgcccccacggcaatcgtgctgttctatcagcatcacaactgcacttcagggcacattcccatgcagctgccctacaggaccaccaaggtcttgagagagagcagcrggtcaacaccaataacaagactaaccacaaaactcccacacagagtggaccaggagttcttccaatggagtctagggagcagcagctgcaggaggccgtgtcatagcgagacaacacttccagcctcttggcaggaga

SEQ ID NO: 95291 - DNA, 600 bp, Chicken  19866894565951_3
tgcttttgaggatttctcctcatttcctatcaatatctttcayctaccgtaaaagataagtcacagaactctggttgccaagcccctcttttggaagaccaaactgggaagaaaacttactttttgccagtatgtcttgaatgtcagatgctggctgcctgtgcaataacctactgtgaagtaaaaccagactcattacacactattatcattgcttcatttgctgcgtagaaggaccatatgcctcagctacaaacgtmatgcatgacataccctccagccccaaccagtgtcctcctmccccccccccaaaaatgcccccacggcaatcgtgctgttctatcagcatcacaactgcacttcagggcacattcccatgcagctgccctacaggaccaccaaggtcttgagagagagcagcrggtcaacaccaataacaagactaaccacaaaactcccacacagagtggaccaggagttcttccaatggagtctagggagcagcagctgcaggaggccgtgtcatagcgagacaacacttccagcctcttggcaggagaagaagctcgggcaagggcgcctggccttgatttggggcat

SEQ ID NO: 95292 - DNA, 600 bp, Chicken  19866894565951_4; identical to SEQ ID NO: 95291

SEQ ID NO: 95293 - DNA, 600 bp, Chicken  19866894565951_5; identical to SEQ ID NO: 95291

SEQ ID NO: 95294 - DNA, 600 bp, Chicken  19866894565951_6; identical to SEQ ID NO: 95291

SEQ ID NO: 95295 - DNA, 600 bp, Chicken  19866894565951_7; identical to SEQ ID NO: 95291

SEQ ID NO: 95296 - DNA, 599 bp, Chicken  19866894565951_8
tttgccagtatgtcttgaatgtcagatgctggctgcctgtgcaataacctactgtgaagtaaaaccagactcattacacactattatcattgcttcatttgctgcgtagaaggaccatatgcctcagctacaaacgtmatgcatgacataccctccagccccaaccagtgtcctcctcccccccccccaaaaatgcccccacggcaatcgtgctgttctatcagcatcacaactgcacttcagggcacattcccatgcagctgccctacaggaccaccaaggtcttgagagagagcagcrggtcaacaccaataacaagactaaccacaaaactcccacacagagtggaccaggagttcttccaatggagtctagggagcagcagctgcaggaggccgtgtcatagcgagacaacacttccagcctcttggcaggagaagaagctcgggcaagggcgcctggccttgatttggggcataactgattgtcaggagtgactgaaaaaaagtagcagatgttgcaagactccttccatttaacccacaagaaattaaagtgaaagaatgtaaatctctgttctttaatctgggcaaagctat

SEQ ID NO: 95297 - DNA, 600 bp, Chicken  19866894565954_1
atgaacattctcatacagataatcttgcccagatgcccatgatcagcatacctcgagtagaaagccctttagaaaaggtaatgtctcactttcctaaaaatattatccaaaaatataattttgtactacaacatgttagcagtagtctcttggacacgagtaactactgcagtgtgtttaaatgttttggttttgtttctcatagtaaaaaaaactggctttgcaaagatgatgcaagtgttaggcaaggttacgtctaaataatactgcgagcaaacagtcactgaaaagaagataacrtccaaatgaagaaaacatttcaggcatttttactggaaggaaagttagagctgcaaacatgaagttttaaagcaatgttaatttataatcacctcctgtcattacttattaaaatcttttttgtcatgcccatgcttggagatagtaaacaatcctaaacattttaggtcatcaaaagtatgtttctatggcattcttttaaatctgtattactgctgacattttttccaatcaattataagaataaatrtttttaaccacttcctagtstgtgctagtcacttgaaatgggcagaagtt

SEQ ID NO: 95298 - DNA, 600 bp, Chicken  19866894565954_2
ttacgtctaaataatactgcgagcaaacagtcactgaaaagaagataacrtccaaatgaagaaaacatttcaggcatttttactggaaggaaagttagagctgcaaacatgaagttttaaagcaatgttaatttataatcacctcctgtcattacttattaaaatcttttttgtcatgcccatgcttggagatagtaaacaatcctaaacattttaggtcatcaaaagtatgtttctatggcattcttttaaatctgtattactgctgacattttttccaatcaattataagaataaatrtttttaaccacttcctagtstgtgctagtcacttgaaatgggcagaagttgtcctttagtaagaattgctgccagcaataggttttttatttatttgcttggggggaaagatttcttttcagaataatccaacatgtctttttgaaccaaatgtgtctaagctacttctactgatgttttgtcataaggaggtcacagtatcatttgcttgaacaagaacaagcatttagattatcttcaaaataatccattcagtgaattctctgtaaaatgtcaaaacaaaacgaagaatgtcagttg

SEQ ID NO: 95299 - DNA, 600 bp, Chicken  19866894565954_3
gagcaaacagtcactgaaaagaagataacrtccaaatgaagaaaacatttcaggcatttttactggaaggaaagttagagctgcaaacatgaagttttaaagcaatgttaatttataatcacctcctgtcattacttattaaaatcttttttgtcatgcccatgcttggagatagtaaacaatcctaaacattttaggtcatcaaaagtatgtttctatggcattcttttaaatctgtattactgctgacattttttccaatcaattataagaataaatrtttttaaccacttcctagtstgtgctagtcacttgaaatgggcagaagttgtcctttagtaagaattgctgccagcaataggttttttatttatttgcttggggggaaagatttcttttcagaataatccaacatgtctttttgaaccaaatgtgtctaagctacttctactgatgttttgtcataaggaggtcacagtatcatttgcttgaacaagaacaagcatttagattatcttcaaaataatccattcagtgaattctctgtaaaatgtcaaaacaaaacgaagaatgtcagttggcttaggacataccatatta

SEQ ID NO: 95300 - DNA, 600 bp, Chicken  19866894565955_1
ttcatctaaccctgtgccagactgagtttggcaacaacataggctgtgttagatgtatacactgcctacattttaatatgtaggagactagagtaacccttgatcttgagcgtttgcattattatcctccaatttggagctcacctcactagcctaacctctgcagtgcaattcttcctcatgctcagaacagagggctgtgggtcacttctgtccactgccaccttcagcagtggcctctctgagtggaaactttctacatgacagtccaaagcagaaagggcagattagtgaggctasgactggttaaaaagaagtttttgctgtagctgyaccaggtacagcttctttgaaaactgaaataaagtgcattacctaatgcacaattcgccttgaaaaactctccttaggctccttattattaagcatcatccgaaagacttaatttcttgagtcccaggtggcatctgggcagggcccttcgcaggccgtcaagctgcagagttgtgcctgacgttaccacttgtcctttatggctgctgaggtcatgtgtggagaaaaagtgtcccctttgaattcttggttcaacaaatcatctga

SEQ ID NO: 95301 - DNA, 567 bp, Chicken  19866894565955_2
acaacataggctgtgttagatgtatacactgcctacattttaatatgtaggagactagagtaacccttgatcttgagcgtttgcattattatcctccaatttggagctcacctcactagcctaacctctgcagtgcaattcttcctcatgctcagaacagagggctgtgggtcacttctgtccactgccaccttcagcagtggcctctctgagtggaaactttctacatgacagtccaaagcagaaagggcagattagtgaggctasgactggttaaaaagaagtttttgctgtagctgyaccaggtacagcttctttgaaaactgaaataaagtgcattacctaatgcacaattcgccttgaaaaactctccttaggctccttattattaagcatcatccgaaagacttaatttcttgagtcccaggtggcatctgggcagggcccttcgcaggccgtcaagctgcagagttgtgcctgacgttaccacttgtcctttatggctgctgaggtcatgtgtggagaaaaagtgtcccctttgaattcttggttcaacaaatcatctga

SEQ ID NO: 95302 - DNA, 600 bp, Chicken  19866894565958_1
tcaccttgaggaacagagggtgatccaatccctagatggaagtaattgttatattgaaaagtgacatttgggtgacattttcaagatagcagaagaatagtaataaagagatttttatggagtagcactgcttaaccacccatttccatgcgcctttgagaagtgcagatgtatcatcaccccctgacagaggcttggcagagctggaaggacactggatgatgccttcagcctctgagccttaagtctcagcatagcaaaactcagcagatagttcagtacgagcccttaacaaacttmtgtggttctggcaaggaacygtagggctcaccctcgggctgtggtgcagcatcttgaccagcacggtgtgcactgaggatttcacagttaattacttactgccaaactcactttttattgaacagtgcttgcctctgactcattaatggagacttgatgagacgagtttacaagagatgacaatggaatgaaagctgtagctaaagatctcctgatcctggccttctgcagacaccattatgctctctgatgaacaatttcaagacatgtctatcagttgctgttaatgcagactgaaag

SEQ ID NO: 95303 - DNA, 600 bp, Chicken  19866894565958_2
tgatccaatccctagatggaagtaattgttatattgaaaagtgacatttgggtgacattttcaagatagcagaagaatagtaataaagagatttttatggagtagcactgcttaaccacccatttccatgcgcctttgagaagtgcagatgtatcatcaccccctgacagaggcttggcagagctggaaggacactggatgatgccttcagcctctgagccttaagtctcagcatagcaaaactcagcagatagttcagtacgagcccttaacaaacttmtgtggttctggcaaggaacygtagggctcaccctcgggctgtggtgcagcatcttgaccagcacggtgtgcactgaggatttcacagttaattacttactgccaaactcactttttattgaacagtgcttgcctctgactcattaatggagacttgatgagacgagtttacaagagatgacaatggaatgaaagctgtagctaaagatctcctgatcctggccttctgcagacaccattatgctctctgatgaacaatttcaagacatgtctatcagttgctgttaatgcagactgaaagtgaatgtctctgcatcaaga

SEQ ID NO: 95304 - DNA, 599 bp, Chicken  19866894616936_1
  misc_feature (1)..(162): n is any nucleotide
nnnnnnnnnnnnnnnnnnnnnnnnnnnnnnnnnnnnnnnnnnnnnnnnnnnnnnnnnnnnnnnnnnnnnnnnnnnnnnnnnnnnnnnnnnnnnnnnnnnnnnnnnnnnnnnnnnnnnnnnnnnnnnnnnnnnnnnnnnnnnnnnnnnnnnnnnnnnnnnnnncctctaaacagccccagcatcaccacctgacacccattgctggagcatcaccaccagcttcccctcctgcatctcaaagagcaaactgagcggccaagaagaggcggaggggatacatggagcatggctgtgccaggrgacagctggggacatgacccarggggggcactttctgctgtcccttggccaaggtgtttagtcccctgacttccccactgccctgagccagggcgtgacggacctgaaactccgcttgctgtcgctgcgcaataaaatgctatcgactgccaattaaaaagccattccccagaggtttccagctggggaagtgtccgtgtgaggcataatggggcaataacagccatcaaggaggcatccgtcacctccacccctggctgcctgggacygggagcgatgggagatagaggggagaaaat

SEQ ID NO: 95305 - DNA, 599 bp, Chicken  19866894616936_2
  misc_feature (1)..(140): n is any nucleotide
nnnnnnnnnnnnnnnnnnnnnnnnnnnnnnnnnnnnnnnnnnnnnnnnnnnnnnnnnnnnnnnnnnnnnnnnnnnnnnnnnnnnnnnnnnnnnnnnnnnnnnnnnnnnnnnnnnnnnnnnnnnnnnnnnnnnnnnnnnnncctctaaacagccccagcatcaccacctgacacccattgctggagcatcaccaccagcttcccctcctgcatctcaaagagcaaactgagcggccaagaagaggcggaggggatacatggagcatggctgtgccaggrgacagctggggacatgacccarggggggcactttctgctgtcccttggccaaggtgtttagtcccctgacttccccactgccctgagccagggcgtgacggacctgaaactccgcttgctgtcgctgcgcaataaaatgctatcgactgccaattaaaaagccattccccagaggtttccagctggggaagtgtccgtgtgaggcataatggggcaataacagccatcaaggaggcatccgtcacctccacccctggctgcctgggacygggagcgatgggagatagaggggagaaaatggagatcgaagcactttgccac

SEQ ID NO: 95306 - DNA, 600 bp, Chicken  19866894616936_3
aggggatacatggagcatggctgtgccaggrgacagctggggacatgacccarggggggcactttctgctgtcccttggccaaggtgtttagtcccctgacttccccactgccctgagccagggcgtgacggacctgaaactccgcttgctgtcgctgcgcaataaaatgctatcgactgccaattaaaaagccattccccagaggtttccagctggggaagtgtccgtgtgaggcataatggggcaataacagccatcaaggaggcatccgtcacctccacccctggctgcctgggacygggagcgatgggagatagaggggagaaaatggagatcgaagcactttgccacgttgaagtgctctgagagcagctgggaggatcccgaagggcagaggttacctcagccccacattcacctgcacaacaggaccccaaagggaaacactttgcccatgggacaggggctgtgaggctggggctgggtcagcggggcacgggagggagtttgtgagcacacgtcctggctgggggaaaactggggctgggaaagttgtgtaaggagtgggtcagcctgctccgatagccatggggcagcat

SEQ ID NO: 95307 - DNA, 600 bp, Chicken  19866894616945_1
tttctttatttctaattgaaaggcagagcaaaacagcagctgaattaggattctttgtgatggttgtgagacaggatcttggactatgctgtgaagagcatcctctgttatcattactgttgttcccatgccactctgcctggccttgcacaaccctgtttgcaaccaaatggtgctcgcccccactcgtgcttctctgtcagatgcacagatgctccctcttcctttgagtagaaacagccgtgcttgcagagatgtcatcagcactggactcccacttgtaagactgcagtcaaacargcattgcctctgccacctacagatgtcctttgattgcagcagatgtgtgccagtatgagctgactgctgagaggtcaggcggggatgtgcccgtgtctcctggcttttctttcatggaatggtgctgctctttggcttttgcacatgatatgggtgaaaaagcaaggtagtggtggtcttctgaggcagtagtcttctcagtgagtatttggctgttgcttctcttggactagtgctcctctgggttcagcctcagccctcctgcaagcagcagtaagcagtgctagttattgcacagta

SEQ ID NO: 95308 - DNA, 600 bp, Chicken  19866894616947_1
gggggcggaggggggggcgggtattgatttcgcagcagcagcggcagctctgccctcggctatttataggcgcccggagcctttatagggagtgcacatcaaagaggaacgcgtcctttggcggcggagggttgtgatggggaggggttggttctgccactgcccccccctttggccaagagcggggcgcgggggctccgcttctctccctcccgcttccccctccttcccgcaatgcaatgtgtaagcaaagagccaccggagcgctccatccatcacgcagccgctccgcgtctccckcacggactgaatcccggcaacgaatgcgctgagcggcggcgccgggcgccttcagcgctgcgagcaatgttggttttttaaygctaaaatccatcctgcgtgcagaatcccgttggcagacaccgctccgctcgcggttcgttctcaccgccctccctctgccttccatccccaccgccactaaaagcaaaggagaaccccggggagcagagcgctgtcggagccgttcgggttcttttctctccttcttttccctcaattgattttttttttcttcttcttctctaagcttcgccgtat

SEQ ID NO: 95309 - DNA, 600 bp, Chicken  19866894616947_2
ttatagggagtgcacatcaaagaggaacgcgtcctttggcggcggagggttgtgatggggaggggttggttctgccactgcccccccctttggccaagagcggggcgcgggggctccgcttctctccctcccgcttccccctccttcccgcaatgcaatgtgtaagcaaagagccaccggagcgctccatccatcacgcagccgctccgcgtctccckcacggactgaatcccggcaacgaatgcgctgagcggcggcgccgggcgccttcagcgctgcgagcaatgttggttttttaaygctaaaatccatcctgcgtgcagaatcccgttggcagacaccgctccgctcgcggttcgttctcaccgccctccctctgccttccatccccaccgccactaaaagcaaaggagaaccccggggagcagagcgctgtcggagccgttcgggttcttttctctccttcttttccctcaattgattttttttttcttcttcttctctaagcttcgccgtatgcatgaggtcaggcgccgcggttgagatttcccgcagcaccaaatggcagacggggaaagcgagggggggacggggaaaagg

SEQ ID NO: 95310 - DNA, 600 bp, Chicken  19866894616966_1
cgagtcttttccatcagacacatctcagcccctcaaatcttccctcacgtgacgcactgaccaccttctctcattttctcaaagctcaaagtagctttgtcagacaagagatgcttccacatttaaactctcctgttacaaagagatggatcagagggtgggagttttgtggactcagcacacagatacgcagtacagcgttccaatctgaggtgcacagttttagatgaagaggtgagaaaattgtttacttctgttagtttaaataacatgaaaggatgcaattttgaacctgactcrttgtcagcaatactccctcagctactgtaagcaagctgtgagctacagaagcaatgccagatgtaatcactgtaggcccaggtatrcttagaaattaatcagtggctacttccaagtggttacttgagttcagtttttacttttattccagaacacacgtcctcacggggctttacatcagtataattaacctagagtagctgaaccagggaaaaatccagaggtagactgatcttaggattaacttctcacacagaaatcttttctgtaggcaaggagctgacaaacacagctgcagct

SEQ ID NO: 95311 - DNA, 557 bp, Chicken  19866894616966_2
caaagtagctttgtcagacaagagatgcttccacatttaaactctcctgttacaaagagatggatcagagggtgggagttttgtggactcagcacacagatacgcagtacagcgttccaatctgaggtgcacagttttagatgaagaggtgagaaaattgtttacttctgttagtttaaataacatgaaaggatgcaattttgaacctgactcrttgtcagcaatactccctcagctactgtaagcaagctgtgagctacagaagcaatgccagatgtaatcactgtaggcccaggtatrcttagaaattaatcagtggctacttccaagtggttacttgagttcagtttttacttttattccagaacacacgtcctcacggggctttacatcagtataattaacctagagtagctgaaccagggaaaaatccagaggtagactgatcttaggattaacttctcacacagaaatcttttctgtaggcaaggagctgacaaacacagctgcagcttggtgtgctcacccaagtcaagcagaagataaacatgcatctc

SEQ ID NO: 95312 - DNA, 600 bp, Chicken  19866894616971_1
ttcaggaacataattgtagttcatatgtttggcaaactgaaaggtgagaaaattatatatatatatcaagaaatactcaggaagctttatgttggaatccctgtgcttaatataagctgaaagatcaatgaaagaaagtgaatatgttacttacattttcagttgacactgtctggacatgaattacaaatacattgaaggatataatggaaatacaaaataatctcaagggtaatggacagttctaaatggagtttaaatttagataaatattacataatgcattcaagacaaatggtrttatatagaagcattgttgctacagagtgctagataatgtttaagcccttcagccctcagtattccccctccaagtcacttctgagacataagtagatggaaatctgcttgtagtgttgctggaaggggacacagtatgatcccctccaagtctgtgcttctaatccctygagtgtagctcagaatccatctatatatttaccaacacaaccaaccagagaaaaaagacattggtagtggtaccaattgtcccacagtccagaaagcttaggcttttaaattctgactctgataggagtc

SEQ ID NO: 95313 - DNA, 600 bp, Chicken  19866894616971_2
gtctggacatgaattacaaatacattgaaggatataatggaaatacaaaataatctcaagggtaatggacagttctaaatggagtttaaatttagataaatattacataatgcattcaagacaaatggtrttatatagaagcattgttgctacagagtgctagataatgtttaagcccttcagccctcagtattccccctccaagtcacttctgagacataagtagatggaaatctgcttgtagtgttgctggaaggggacacagtatgatcccctccaagtctgtgcttctaatccctygagtgtagctcagaatccatctatatatttaccaacacaaccaaccagagaaaaaagacattggtagtggtaccaattgtcccacagtccagaaagcttaggcttttaaattctgactctgataggagtccagatgaaatttctaatagcagttatgcagttaatcattggtcctgcagcccttattcaatcatgacgtaggctgatatgtttacaggctccacataccataccagtgctatgtctaaacttgtggctgttgctgtgagttcattttttaatgtaaagtacatcctgatt

SEQ ID NO: 95314 - DNA, 599 bp, Chicken  19866894616980_1
  misc_feature (1)..(73): n is any nucleotide
nnnnnnnnnnnnnnnnnnnnnnnnnnnnnnnnnnnnnnnnnnnnnnnnnnnnnnnnnnnnnnnnnnnnnnnnnttttgaggcatgccccccatctcaggggaggaatgcagggaaggtgcggcttatgtaggcaggcagacaactccaggaaaggcaccgaatgcagtaacagtcacagcaacgtccgaaagtttgcagcgaaaatccaaattctgcagggaagaaaacccagcctgcagccagcttaaatgttttagccaagtcagctgggcagatctgcaggcttgggtttcggcagycaggggcacgtcgtcttccttcccaataattaatggggttttcaattggtaggtatcccctagcactgcgttttccagccccggtcagtgagctctgcccrgcaggatggcggcgyggtgccagcagagcgccctgcctcgctgcgctcacgtacacactgacrgtgccctcctgctctcccagcctggaaggaaccctcctttgagcaccacayagtgctcrccatgcaggctgctcattatcccgggcatttcaggactaatttataggacatgtggttaatttgcataagccatcc

SEQ ID NO: 95315 - DNA, 600 bp, Chicken  19866894616980_2
aggaatgcagggaaggtgcggcttatgtaggcaggcagacaactccaggaaaggcaccgaatgcagtaacagtcacagcaacgtccgaaagtttgcagcgaaaatccaaattctgcagggaagaaaacccagcctgcagccagcttaaatgttttagccaagtcagctgggcagatctgcaggcttgggtttcggcagycaggggcacgtcgtcttccttcccaataattaatggggttttcaattggtaggtatcccctagcactgcgttttccagccccggtcagtgagctctgcccrgcaggatggcggcgyggtgccagcagagcgccctgcctcgctgcgctcacgtacacactgacrgtgccctcctgctctcccagcctggaaggaaccctcctttgagcaccacayagtgctcrccatgcaggctgctcattatcccgggcatttcaggactaatttataggacatgtggttaatttgcataagccatcctgtacacagaagatgtctccacagtaaagtaatatgccagaatctggatttatgtgaaaacatgaatgctgggcggggggagcgcttttagaagctgtcatt

SEQ ID NO: 95316 - DNA, 600 bp, Chicken  19866894616980_3
gtgcggcttatgtaggcaggcagacaactccaggaaaggcaccgaatgcagtaacagtcacagcaacgtccgaaagtttgcagcgaaaatccaaattctgcagggaagaaaacccagcctgcagccagcttaaatgttttagccaagtcagctgggcagatctgcaggcttgggtttcggcagycaggggcacgtcgtcttccttcccaataattaatggggttttcaattggtaggtatcccctagcactgcgttttccagccccggtcagtgagctctgcccrgcaggatggcggcgyggtgccagcagagcgccctgcctcgctgcgctcacgtacacactgacrgtgccctcctgctctcccagcctggaaggaaccctcctttgagcaccacayagtgctcrccatgcaggctgctcattatcccgggcatttcaggactaatttataggacatgtggttaatttgcataagccatcctgtacacagaagatgtctccacagtaaagtaatatgccagaatctggatttatgtgaaaacatgaatgctgggcggggggagcgcttttagaagctgtcattagcagcaatctctaa

SEQ ID NO: 95317 - DNA, 600 bp, Chicken  19866894616980_4
cagtaacagtcacagcaacgtccgaaagtttgcagcgaaaatccaaattctgcagggaagaaaacccagcctgcagccagcttaaatgttttagccaagtcagctgggcagatctgcaggcttgggtttcggcagycaggggcacgtcgtcttccttcccaataattaatggggttttcaattggtaggtatcccctagcactgcgttttccagccccggtcagtgagctctgcccrgcaggatggcggcgyggtgccagcagagcgccctgcctcgctgcgctcacgtacacactgacrgtgccctcctgctctcccagcctggaaggaaccctcctttgagcaccacayagtgctcrccatgcaggctgctcattatcccgggcatttcaggactaatttataggacatgtggttaatttgcataagccatcctgtacacagaagatgtctccacagtaaagtaatatgccagaatctggatttatgtgaaaacatgaatgctgggcggggggagcgcttttagaagctgtcattagcagcaatctctaacgcatacctctgataaaagtcacagaatgctgcctctctacctactgc

SEQ ID NO: 95318 - DNA, 600 bp, Chicken  19866894616980_5
gcagggaagaaaacccagcctgcagccagcttaaatgttttagccaagtcagctgggcagatctgcaggcttgggtttcggcagycaggggcacgtcgtcttccttcccaataattaatggggttttcaattggtaggtatcccctagcactgcgttttccagccccggtcagtgagctctgcccrgcaggatggcggcgyggtgccagcagagcgccctgcctcgctgcgctcacgtacacactgacrgtgccctcctgctctcccagcctggaaggaaccctcctttgagcaccacayagtgctcrccatgcaggctgctcattatcccgggcatttcaggactaatttataggacatgtggttaatttgcataagccatcctgtacacagaagatgtctccacagtaaagtaatatgccagaatctggatttatgtgaaaacatgaatgctgggcggggggagcgcttttagaagctgtcattagcagcaatctctaacgcatacctctgataaaagtcacagaatgctgcctctctacctactgcatgcgaagctcccatgtaatttttcgctttgaatattgctcgtctttttta

SEQ ID NO: 95319 - DNA, 600 bp, Chicken  19866894616980_6
gaaaacccagcctgcagccagcttaaatgttttagccaagtcagctgggcagatctgcaggcttgggtttcggcagycaggggcacgtcgtcttccttcccaataattaatggggttttcaattggtaggtatcccctagcactgcgttttccagccccggtcagtgagctctgcccrgcaggatggcggcgyggtgccagcagagcgccctgcctcgctgcgctcacgtacacactgacrgtgccctcctgctctcccagcctggaaggaaccctcctttgagcaccacayagtgctcrccatgcaggctgctcattatcccgggcatttcaggactaatttataggacatgtggttaatttgcataagccatcctgtacacagaagatgtctccacagtaaagtaatatgccagaatctggatttatgtgaaaacatgaatgctgggcggggggagcgcttttagaagctgtcattagcagcaatctctaacgcatacctctgataaaagtcacagaatgctgcctctctacctactgcatgcgaagctcccatgtaatttttcgctttgaatattgctcgtcttttttattaagtaa

SEQ ID NO: 95320 - DNA, 600 bp, Chicken  19866894616980_7
aagtcacagaatgctgcctctctacctactgcatgcgaagctcccatgtaatttttcgctttgaatattgctcgtcttttttattaagtaagatgggttttgatccttaaaacggccttgaaatacgaataccccgatctgctggctttgtctaaaagggaagcaaaatccccaaactggctctgcgcacgacgccacgggctcggctatggcagcgaggagcccgctgcatccgctactctgattgttacctccaccccagcagcagtggggcccgtcagccttgaagcagctgacatytgaggcacaggctcttcctgtgctttgagttagtcggcccttgatcccgtgcctgctttgcgctgggggctgaccttcttgcgcagctctgctcccgctctgccgctcgggaaggctgagctgctgtctgcaggactccgaattagagctgcgtgggtcagaggagcagacgggagagtcatcattacgagagctgatggctgtccttgatgggtgcgatattgctttttttttggtaacgatgacaaaataagagcattgcgagcagtgttttaagtgtcccgctcccctgcaaggtgg

SEQ ID NO: 95321 - DNA, 600 bp, Chicken  19866894616989_1
tttcagacatagggtttcatttctgggtagtcctctatagagccaggagctggacttgatgatcctgcacatcccttccagctcaggatattctgtgattctaggattctaaccattgcatgccacaggatgtcaggtactggggcaacacctgactgcactgcatggacctgacctggagcgaagtccaagggccagatggccatctacaaccacagagccctctgtccaacgatgatctcagaggacaggcatcacatcattgcttaaccagtggcacagggccaagaagtgacagcyctggccgaggaagctgtgtggggccagggtgactcaccgtgattcggcaaggaaaacagagtagaaagaaactgtgtggaaggcaagccagtcagcaggtgatggcacaaaggagctgggacttccatgctgcctgctgtgactgagtgcaagacagaaagcgggaggacgggaggcaggacacagaaatgtcttcaaatcagcccgtgagtcatccatagtatgagaccacttgggagaataaatccatagagaacatttaaatggtcctagtcagtaatgcatggtttcatttactgc

SEQ ID NO: 95322 - DNA, 599 bp, Chicken  19866894617007_1
  misc_feature (1)..(173): n is any nucleotide
nnnnnnnnnnnnnnnnnnnnnnnnnnnnnnnnnnnnnnnnnnnnnnnnnnnnnnnnnnnnnnnnnnnnnnnnnnnnnnnnnnnnnnnnnnnnnnnnnnnnnnnnnnnnnnnnnnnnnnnnnnnnnnnnnnnnnnnnnnnnnnnnnnnnnnnnnnnnnnnnnnnnnnnnnnnnnctcccctagtcagagatataatggtctcaagacttcttgccctcttcagccacatttcctctttcctccactggttgtcagcaccgtgctgtgctgcagccctgtccggctgtgtcttctgccccayggaggctgccctggggaacctggaggtgttacctggtgaagctgctctgtagyggggctgctgtcactgccctgctcctcctatgtcccgtgtctcggcagacccagctcagctgggcacctgctggagtctgtcaggccttactgcctcctcctcttgctaaaggaatcaccaaatttgcatctctgccctggagagcatctgattgctctcctccttgaagggctcccccatgcaagctgctctgaggtcaccagctgagactcagcgctgtcctggttatgggaagatggtgctgg

SEQ ID NO: 95323 - DNA, 599 bp, Chicken  19866894617007_2
  misc_feature (1)..(120): n is any nucleotide
nnnnnnnnnnnnnnnnnnnnnnnnnnnnnnnnnnnnnnnnnnnnnnnnnnnnnnnnnnnnnnnnnnnnnnnnnnnnnnnnnnnnnnnnnnnnnnnnnnnnnnnnnnnnnnnnnnnnnnnnctcccctagtcagagatataatggtctcaagacttcttgccctcttcagccacatttcctctttcctccactggttgtcagcaccgtgctgtgctgcagccctgtccggctgtgtcttctgccccayggaggctgccctggggaacctggaggtgttacctggtgaagctgctctgtagyggggctgctgtcactgccctgctcctcctatgtcccgtgtctcggcagacccagctcagctgggcacctgctggagtctgtcaggccttactgcctcctcctcttgctaaaggaatcaccaaatttgcatctctgccctggagagcatctgattgctctcctccttgaagggctcccccatgcaagctgctctgaggtcaccagctgagactcagcgctgtcctggttatgggaagatggtgctggaaaggtggacgttttcacacacacctttgtaaaaatgtctgcttcctgcagct

SEQ ID NO: 95324 - DNA, 523 bp, Chicken  19866894617007_3
gctgctgtcactgccctgctcctcctatgtcccgtgtctcggcagacccagctcagctgggcacctgctggagtctgtcaggccttactgcctcctcctcttgctaaaggaatcaccaaatttgcatctctgccctggagagcatctgattgctctcctccttgaagggctcccccatgcaagctgctctgaggtcaccagctgagactcagcgctgtcctggttatgggaagatggtgctggaaaggtggacgttttcacacacacctttgtaaaaatgtctgcttcctgcagctggtygcygccttcctcccagaggtggtccaatgtcagagctgctaaatatatgcagctatgtaaatgttttattttattccaatcttgtgataatgaatatttcagcaaaacgttttgctcttattttcttgctatctccctcctcagataagtgaccggcttgaacagtttttgtggctaaaactggatgaagcattcaaaacaccgtgcacaccaacaacaccat

SEQ ID NO: 95325 - DNA, 520 bp, Chicken  19866894617007_4
gctgtcactgccctgctcctcctatgtcccgtgtctcggcagacccagctcagctgggcacctgctggagtctgtcaggccttactgcctcctcctcttgctaaaggaatcaccaaatttgcatctctgccctggagagcatctgattgctctcctccttgaagggctcccccatgcaagctgctctgaggtcaccagctgagactcagcgctgtcctggttatgggaagatggtgctggaaaggtggacgttttcacacacacctttgtaaaaatgtctgcttcctgcagctggtygcygccttcctcccagaggtggtccaatgtcagagctgctaaatatatgcagctatgtaaatgttttattttattccaatcttgtgataatgaatatttcagcaaaacgttttgctcttattttcttgctatctccctcctcagataagtgaccggcttgaacagtttttgtggctaaaactggatgaagcattcaaaacaccgtgcacaccaacaacaccat

SEQ ID NO: 95326 - DNA, 600 bp, Chicken  19866894617015_1
cttaaagttcatttatttctttatttagttattacaaaagcatgaaaatataacatgcaaaaggtgcctgtgtacataggctgtgtggtgcaagttcacccactgccccagcaccatcagaaggagcaaccgagtgacccacatgggtccctccctgagctgatggagtcgtgccataccgtactgcaggaaggggcaggatgcagaaatcgtggctttgacagagacacagaatttgttgagcttctcttgttctaaatgttgagtgtgaagcagagcatcccttactcagctcagccmcacacagctgcgagtgcagagcagcactgctgggtttctcmtgttggttctcttccagaggcacctttgagtctctttttctaactaaagggttgtgctgcatgtttaaaagaaaactaagaatagaggctgatagcccataattcatttctraattacacagagcatggaaaactgtgatctcaggtgaaaaagaggcagagaaagaggcagggaaagccagtgtgatgggaaactgctgctgccaacttcccacagcacatgcaccagtgctgcttctatttcttctataccccagag

SEQ ID NO: 95327 - DNA, 600 bp, Chicken  19866894617015_2
atgaaaatataacatgcaaaaggtgcctgtgtacataggctgtgtggtgcaagttcacccactgccccagcaccatcagaaggagcaaccgagtgacccacatgggtccctccctgagctgatggagtcgtgccataccgtactgcaggaaggggcaggatgcagaaatcgtggctttgacagagacacagaatttgttgagcttctcttgttctaaatgttgagtgtgaagcagagcatcccttactcagctcagccmcacacagctgcgagtgcagagcagcactgctgggtttctcmtgttggttctcttccagaggcacctttgagtctctttttctaactaaagggttgtgctgcatgtttaaaagaaaactaagaatagaggctgatagcccataattcatttctraattacacagagcatggaaaactgtgatctcaggtgaaaaagaggcagagaaagaggcagggaaagccagtgtgatgggaaactgctgctgccaacttcccacagcacatgcaccagtgctgcttctatttcttctataccccagagcagcctggggtaatccagcctcttcccaagctccctgggat

SEQ ID NO: 95328 - DNA, 600 bp, Chicken  19866894617015_3
cctgagctgatggagtcgtgccataccgtactgcaggaaggggcaggatgcagaaatcgtggctttgacagagacacagaatttgttgagcttctcttgttctaaatgttgagtgtgaagcagagcatcccttactcagctcagccmcacacagctgcgagtgcagagcagcactgctgggtttctcmtgttggttctcttccagaggcacctttgagtctctttttctaactaaagggttgtgctgcatgtttaaaagaaaactaagaatagaggctgatagcccataattcatttctraattacacagagcatggaaaactgtgatctcaggtgaaaaagaggcagagaaagaggcagggaaagccagtgtgatgggaaactgctgctgccaacttcccacagcacatgcaccagtgctgcttctatttcttctataccccagagcagcctggggtaatccagcctcttcccaagctccctgggatgtggtatctcccggcagctctgtttcttcttccatacagcaaagacaatacaaagctccctttaggaaagctgcagagatggtcaagatggggtctctaagatggaaggcac

SEQ ID NO: 95329 - DNA, 600 bp, Chicken  19866894617020_1
gaaatggccgggtgtggatgcagctaggggctgagtgaggcagggcaggttgtggaggcacttttctcattgcagcgtgtgtatcagtgtgtctttggttctgctgccaccagagattgagtgaggatggagggacttacactgaagagagacgttctctttgtttctggaggtgtgactgaggacacagaggtggagggggcttgggaagaagggggatgctaaacgtgaaagctcagctgtgtgccctgcaccgtttgtctgtactgggatgctgatggggtgatgatggtggtctcrtttcagctgagtgccagctcactgcccaggacgtcctccacgggctgggcacagttgccaggaagaactgcatcgactcacacagcttctctactgctgactatgcagctggctgggaacgggcagctgtgaacgtgacgactgcgtggtcctattcaccacctgacctcacagggtaaggagctgcacccgcagccaaagctctgccccatgtcctaaagacatgtgaacttctcagttgatttggtgccctgggtggttggtaggggctgttctgtctcagtctccagccctcatttc

SEQ ID NO: 95330 - DNA, 576 bp, Chicken  19866894617025_1
acaagaaaaatgtagataggagtacacaaaatagatttagctgttgcaagcatctgaactcattacctgttttgtccttggattcaagctaaaagagttggtagaacatgagaacttgactttagcaagtctccataacactgtctcccataacatccataatgaagcttagaaattgtgggataggtgaatggaaagcgaagtggattgagaactggcagagctcagaacgttgtggtcagtgatgtcgatggtagttggaagccttaagtaatggtgttcccttggggttggtactgsgtctgctcttcaccagtgtcctgaatgaagggctaggctccaccctcagcaagttttctgatgagacaaagctgggaggagtggctggcataccagaaggctgtgctaccattcactaaaacctggacaaactggagagttgagcagggaggaacctgatgaggttcaacaagagcaagtaaagtgtctagcacctgggtaggaataagcacatgcatcaatacaggttcagaggtaaccagctggagacaagctctgcagagaaggacctgtgtg

SEQ ID NO: 95331 - DNA, 600 bp, Chicken  19866894617034_1
aatcctattatccacatcactgacaaagatggtaaaaagcactagtcctgatgtcaatcactgagaaatgccactcatcaccaactctcccctggacattgagccattaaccacaactctgagtgctatcattcagccagctccttattcaccacatcatccatccatcaaatccatgtctccccaatttaaagactaggatgtcatatgcaacaaggatgccaaatgtgacagtgtgaaatgcttctcacaagtccatgtagattacaacagttactcttcccttatccatcagtactstattcctattctagaaggccaaaggccatcaaaacgtatgataagtaatcatttaaaagtatgataaattaatcatttgtcaggaatgtgragaggcagcaatggcagccatcttcgcacctcacctggataatatttttctcatggttggtgaagaagtttagtcagtttgatactyttctgtgttcccccagggagttcagggggttctgctttttgcatcctaagaaatataaatcagaatacatctctttatgaaatttatcctggcttaggaggcaacaaaattattatgttttc

SEQ ID NO: 95332 - DNA, 600 bp, Chicken  19866894617034_2
ctggacattgagccattaaccacaactctgagtgctatcattcagccagctccttattcaccacatcatccatccatcaaatccatgtctccccaatttaaagactaggatgtcatatgcaacaaggatgccaaatgtgacagtgtgaaatgcttctcacaagtccatgtagattacaacagttactcttcccttatccatcagtactstattcctattctagaaggccaaaggccatcaaaacgtatgataagtaatcatttaaaagtatgataaattaatcatttgtcaggaatgtgragaggcagcaatggcagccatcttcgcacctcacctggataatatttttctcatggttggtgaagaagtttagtcagtttgatactyttctgtgttcccccagggagttcagggggttctgctttttgcatcctaagaaatataaatcagaatacatctctttatgaaatttatcctggcttaggaggcaacaaaattattatgttttctgggttttcttttcccttttattttcttgagcttcaatgttcttcccccatgcacttttactgtgttttctgaatagcaactaaaatgatg

SEQ ID NO: 95333 - DNA, 600 bp, Chicken  19866894617034_3
tctccccaatttaaagactaggatgtcatatgcaacaaggatgccaaatgtgacagtgtgaaatgcttctcacaagtccatgtagattacaacagttactcttcccttatccatcagtactstattcctattctagaaggccaaaggccatcaaaacgtatgataagtaatcatttaaaagtatgataaattaatcatttgtcaggaatgtgragaggcagcaatggcagccatcttcgcacctcacctggataatatttttctcatggttggtgaagaagtttagtcagtttgatactyttctgtgttcccccagggagttcagggggttctgctttttgcatcctaagaaatataaatcagaatacatctctttatgaaatttatcctggcttaggaggcaacaaaattattatgttttctgggttttcttttcccttttattttcttgagcttcaatgttcttcccccatgcacttttactgtgttttctgaatagcaactaaaatgatgatttttgaaatacccatttgaataccttttaaaggttttactcataatactgtgggatgctttttattttatgtatttttataatgc

SEQ ID NO: 95334 - DNA, 600 bp, Chicken  19866894617036_1
gaagattcaggctggacgttaggaaatactacttctctgaaagggtggtcaggcactggaatgggctgcccagaggggtggtggagtcaccgaccctggaggtgttcaaggaacgtttggacgttgtgttgagggacatggtttaatgagggccattggtgatgggtgaatggttggactgggtgatcctgtgggtcttttccaacctttgtgattctatgattctatcattctacgattctaagtccaggatggatggatggatggatggatgctctcggaggccttttccaatcatgktgactccataattctgtgatcatggcgaggttgggttgacagttggactggatgatctcagagctcttctccaacctcagtgattctatctatctacgacccatcccctcctcgctctcccctccagacgaggaaatcccaagctgcaaagaggcggcggcagagacgacgagctcagaggaggagcaggagcccggcttccttcccttggccaccgccttcggtcagagccggcgtggtgagagcccaacggatggacgagccctacggcgctccagccgcggctccttcacccgcggc

SEQ ID NO: 95335 - DNA, 600 bp, Chicken  19866894617043_1
agctttcattaggttgctcagagcctgatccagcctcaccttgaaagtctccagggatggggcatccaccaaatctctgggcagcctgtgccagtgcttcaccaacctcactataaaagacttcttgccttatgcctaacctaaatctactctctttaagcccgaaaccaagacaagaactgtggagatgcagcacttggggacatggtcagtgagaatgatgggggtggatttgggttgggcttcagggtcttgggggtcttttccaacattaacaatttcttgattctatgattttaygatcctggtgagatcgcccatcatgacttaatgagttcagaccacagttaattaatatttggggccaaggtggctctcagccactcctgcaccatgtttccactccagttgtgctgatttgagcatcatgaaatctgtaggtttgtacatgcgatgtacccagccaagcatgcattctgcagagaaacatcgctctaaatagcagtgaagtcatcagaatatggaaaaaatatgaaaagcaaacatattcaggagttctaaaaatcaaactgtgataaatatcagcataacaagcctcat

SEQ ID NO: 95336 - DNA, 599 bp, Chicken  19866894617044_1
  misc_feature (1)..(2): n is any nucleotide
nncagattaaaaatgaagagatgaacacttccatgatgtaccactgagcaaactccagcacaaactccaacactctctcatggcctcagcagaaatactgaagaaggacattaaacagattggagtaagccaacaagatgtatctagatctagatctagaaaaaaggaagataagaattagagaagaaattagacaaatcaattggaatagaaagatttagaaaataattagaaaaaaaattagaaagaaaaaagaaaagaaagaattagaaaaagaccaaggaaaaagaattagaattrgaaagaaattagaactagaaaaaaatataaaatcagaaaaataagaaatacaaagtaaaaaaacaaacaacaamaaaaaaaacacaagcagaaatagacgggggaaaagggaaaacagaattagaaaataaggaaaaaaggaaaaagaaatacaattagagaatgaaacagaacttgaattagaaagaagttctagtccagcagcctccactacaggaaggatgagaacctcttgaagtgggcagagaagagaacaactaagatgatccggaagtctgaccacctgtcctataagggaa

SEQ ID NO: 95337 - DNA, 598 bp, Chicken  19866894617044_2
ctctcatggcctcagcagaaatactgaagaaggacattaaacagattggagtaagccaacaagatgtatctagatctagatctagaaaaaaggaagataagaattagagaagaaattagacaaatcaattggaatagaaagatttagaaaataattagaaaaaaaattagaaagaaaaaagaaaagaaagaattagaaaaagaccaaggaaaaagaattagaattrgaaagaaattagaactagaaaaaaatataaaatcagaaaaataagaaatacaaagtaaaaaaacaaacaacaamaaaaaaaacacaagcagaaatagacgggggaaaagggaaaacagaattagaaaataaggaaaaaaggaaaaagaaatacaattagagaatgaaacagaacttgaattagaaagaagttctagtccagcagcctccactacaggaaggatgagaacctcttgaagtgggcagagaagagaacaactaagatgatccggaagtctgaccacctgtcctataagggaaggctaacagaatgggacttgattagcttgcacacaagaaagctctgatgagacctcactgtatccttccagta

SEQ ID NO: 95338 - DNA, 600 bp, Chicken  19866894617045_1
tgttcagtgcgttcttcttaaagaggttcttccctattcttaatttgtttgctgtgactgtcacagctttaagcagacaaaacagggtcatattcctcagtgacttgatgctgtcctttgactcgtaagttattcagcaaggaaaacagattatgaaattgatgcgctcataaagatggcaaacaaatactaggctttagctacatgcagctgaccacttagtgcagcagtctcttcacctgaggaaataaggtggcctgccagagcaggcattttcttttgcaagctgctttgcaatgrgtgttatctgtagggttttctttgtggtgttctgttcttgttttattttttgacaggctgagagttaatgtttaggcagtaaagaagtgagaagtttgatgaaagaacggtctctccctgtacgttaggtttgttttgatatataatactgtttcaccagcaaaagtgaagtttcttaatatagctgttgttttcccttcaacccacgtggtaatggtcacctctgaaggaagtaactgagacttcaattcttttgtattgaaacctttagcaaagggacctggggatagtcattcacct

SEQ ID NO: 95339 - DNA, 600 bp, Chicken  19866894617051_1
agttgctcgtgcttaaaaactggcaaaactgccaaggcatctaaagcactgcacagatagatctcagtgctcaagtttaaatgaggatggcaggcaacccactgtaacactaaggatttgtttcttcctccactgactgtccgctcttgttaagcactttctcaacatcatcttacatataaatatgcaatcacactacaattcctctattgaagagctatccaccagaaccttacctcttgaatagttgttcagtatggagtaattaaacaggaataccattgcctactcacagaatcrttgtyctattacatggtttaaaattttatattatccaagtgaagagaaaaaagtattgtttttacaatctcaggctatagaaagagctttttctttctttgtaatttcaagtgattgaactttcacacttttgctagccttaaataatctttatatgatgtttttcaatttaaaattttttattcatagaatggtatgattgcataaacttctttggaatgaacaaagtaaatattacataatagtttgccttctttcatagtctaccatgtaatccctcccaggtgtccaccaaacaga

SEQ ID NO: 95340 - DNA, 600 bp, Chicken  19866894617051_2
ctcgtgcttaaaaactggcaaaactgccaaggcatctaaagcactgcacagatagatctcagtgctcaagtttaaatgaggatggcaggcaacccactgtaacactaaggatttgtttcttcctccactgactgtccgctcttgttaagcactttctcaacatcatcttacatataaatatgcaatcacactacaattcctctattgaagagctatccaccagaaccttacctcttgaatagttgttcagtatggagtaattaaacaggaataccattgcctactcacagaatcrttgtyctattacatggtttaaaattttatattatccaagtgaagagaaaaaagtattgtttttacaatctcaggctatagaaagagctttttctttctttgtaatttcaagtgattgaactttcacacttttgctagccttaaataatctttatatgatgtttttcaatttaaaattttttattcatagaatggtatgattgcataaacttctttggaatgaacaaagtaaatattacataatagtttgccttctttcatagtctaccatgtaatccctcccaggtgtccaccaaacagaatgaa

SEQ ID NO: 95341 - DNA, 600 bp, Chicken  19866894617054_1
acagaggaggggctgtttgttagcctgagccgtgggtaggggcgcagtgggagaatttacaaagttggctctttgagagcagtgctgatacaagcagctctgaggcggatgtctcagcagcttctgatgtgcacagaggtccagaggggcaaaaaaaaaagagaaggtttggagatgttgtgccactctggctgtctttggttttcattgtgggctccgttgcactatcaggtgctgtagctacaagcaggtacagtctaggatgtccaggcaacagaggaactggcttgtaacgtggtrtatacactgaggagtgccaggaggcttcttggaaatttaaatatatttctctaattcttgggcttatttaggctcttatatcttgggtyctcacagaactgatgactctattgagggtttcagagccactcttaatcagcgccacataaagtaatggctggttttataattacaaagtagggatttggggctacattggggaaggaaaaatctctccttcaatactggataatatttcttccccaaatgaaaagactctctcaatttctgcacttctgaaggatactcggtgtatgcctg

SEQ ID NO: 95342 - DNA, 600 bp, Chicken  19866894617054_2
acaagcagctctgaggcggatgtctcagcagcttctgatgtgcacagaggtccagaggggcaaaaaaaaaagagaaggtttggagatgttgtgccactctggctgtctttggttttcattgtgggctccgttgcactatcaggtgctgtagctacaagcaggtacagtctaggatgtccaggcaacagaggaactggcttgtaacgtggtrtatacactgaggagtgccaggaggcttcttggaaatttaaatatatttctctaattcttgggcttatttaggctcttatatcttgggtyctcacagaactgatgactctattgagggtttcagagccactcttaatcagcgccacataaagtaatggctggttttataattacaaagtagggatttggggctacattggggaaggaaaaatctctccttcaatactggataatatttcttccccaaatgaaaagactctctcaatttctgcacttctgaaggatactcggtgtatgcctgctggatgttacataatttttttggagagctgtgaatagggagagagagagagcctgcacgtcaaatgccatctgttaaacctatttaac

SEQ ID NO: 95343 - DNA, 600 bp, Chicken  19866894617057_1
ggccaacgtatcacctgcatgctgtttgcacggttctgtgcttttgacctctgcaaggtgacgtggtggtgaggccttgtaggatctgaggagctacacaccgtgaaggccaagcagcagagcaccaaatctgtgcttctgaagccttttccaccctacacgtcttttccttccctctctggctgtcaagaccctttgcttgttacataggcactaaggaataaccccttcacttacataggaaggttttcaactcccacaaaacattcccactccaggaaacttgttttaactcttgcwttcaccagtatagaaacagcagtagaaagccaagcctgctggcttcaagaggaagaataagcctccgttctgcagcaagcaccatgggctctttgaagtcttcccagagcaggagttagtctctctctctttctttccttgatcactttgtgcatgttttcgtagacctgaacttctattctgaattacttttgaagcygaacctcttacaagtcttcagatcagatcctggttcatctcactgaatcatagaaccatggaatagttctataggaatagttggaggggaccttaaagata

SEQ ID NO: 95344 - DNA, 600 bp, Chicken  19866894617057_2
ttgttacataggcactaaggaataaccccttcacttacataggaaggttttcaactcccacaaaacattcccactccaggaaacttgttttaactcttgcwttcaccagtatagaaacagcagtagaaagccaagcctgctggcttcaagaggaagaataagcctccgttctgcagcaagcaccatgggctctttgaagtcttcccagagcaggagttagtctctctctctttctttccttgatcactttgtgcatgttttcgtagacctgaacttctattctgaattacttttgaagcygaacctcttacaagtcttcagatcagatcctggttcatctcactgaatcatagaaccatggaatagttctataggaatagttggaggggaccttaaagataagaatgtagttccaacccccttgccatgggctggttgccagccatcagatcaggcccatccaacctggccttcaatgcttccagagatgggacatccacagattctctgggcagcctgtggcagtacctcacccttgtgtaaaaaatttcttcttaacatctaacctgaatcttctctcttttagtttaaagccatccc

SEQ ID NO: 95345 - DNA, 600 bp, Chicken  19866894617067_1
cttacataagaaatgtctaatattgttttggtattatgtagtgtcagagtttggtaggaaaagtatgtgcttagtgtttctttacctaaatgactttaatatgtgctgcagaaggggtactaaactgaagcgaatgagaataaagaacaattcaggatagctggcaacagcaaataagtcagctttttctgaatcatcacttcctgggttcttcggctggagatgttgctgttggaaatgcagccatagaactgggtggtatttgcctggtgctgcagtctgctttgcacctggtgtcarccactcacagcatgctcccatattgcaamaggatttctgcatttaacagttttatttgcattttccctttatctgatagaaggatatatttcttacataacaaaatttcttgacaagatcagtggggccttgttttgacataattaggcctaattagattactcctaaggctaaggctgtgctggaacagaagctggcaggttttatagtcagacataaattaaaagtactctgcaagcaaatttattttaggaatgataagagatgtatgcatacaaaaggtatgtatataaaatgtgt

SEQ ID NO: 95346 - DNA, 600 bp, Chicken  19866894617067_2
ggtattatgtagtgtcagagtttggtaggaaaagtatgtgcttagtgtttctttacctaaatgactttaatatgtgctgcagaaggggtactaaactgaagcgaatgagaataaagaacaattcaggatagctggcaacagcaaataagtcagctttttctgaatcatcacttcctgggttcttcggctggagatgttgctgttggaaatgcagccatagaactgggtggtatttgcctggtgctgcagtctgctttgcacctggtgtcarccactcacagcatgctcccatattgcaamaggatttctgcatttaacagttttatttgcattttccctttatctgatagaaggatatatttcttacataacaaaatttcttgacaagatcagtggggccttgttttgacataattaggcctaattagattactcctaaggctaaggctgtgctggaacagaagctggcaggttttatagtcagacataaattaaaagtactctgcaagcaaatttattttaggaatgataagagatgtatgcatacaaaaggtatgtatataaaatgtgttttccaatcataagttatgaaaaataaaa

SEQ ID NO: 95347 - DNA, 600 bp, Chicken  19866894617076_1
ttaataaaatacacatcaagacggtaaattccagagagcttctgaaatttaaatgtgcgataaaatggaaaagcgttttctccaggcacacgtttaacagaaacagatatgacacagaccttactgacaatctggaaagcagcaagcggattttcaggagatagtacatcttctacgctctgaaatatatcactactgcaaactagtgcatctgctcagtggaatctgtgttagcatcaacttgctttagaagcatttagttttctgtttaggttggaaaaaaacaacgaaacaaaaaamcaaagttgtacttctaatggatggcactgccccccccggccccaaaagattaatgtgatgactgttgctctgctaaggaggacaacgtaatgttatttattaaaccagttttaatccatccttgtctacaccgatcgcgtttgattagcagtttgaattcctgcacacactacctgctctcagctgaagcaatgagctatgtggcttccagcagccttaggggactgcaaggtagaaaatgttgcaattcaggattgttctttatttccatatgttgctaagcacttcagctgtcaccag

SEQ ID NO: 95348 - DNA, 599 bp, Chicken  19866894617083_1
  misc_feature (1)..(171): n is any nucleotide
nnnnnnnnnnnnnnnnnnnnnnnnnnnnnnnnnnnnnnnnnnnnnnnnnnnnnnnnnnnnnnnnnnnnnnnnnnnnnnnnnnnnnnnnnnnnnnnnnnnnnnnnnnnnnnnnnnnnnnnnnnnnnnnnnnnnnnnnnnnnnnnnnnnnnnnnnnnnnnnnnnnnnnnnnnnagatttttttctacttccctcagcctctcactctgagatggagacagctccttgcaaaatttaaactgaaataataatctgaaaggtagcgagacatggtgacgttcctactgtttctccatttcagcrtgcaataggacatgcaagacttgttcttcttcmactgcctgccttacgtgcagaaatggcctgatcctgaatcgtaacgggcactgcgtgctatccggacactgctctcgcaccgagtactatgatgagaagactgagacctgcaaaacttgtcataagaaatgttttcactgctcaggaccaactgaacaccagtgtattagttgtgcaaataaccgctatcttttcagtaagtgtctttctcctgtttataggctttattccacgctggcagcatgaaataaacaagcttatrtgac

SEQ ID NO: 95349 - DNA, 599 bp, Chicken  19866894617083_2
  misc_feature (1)..(138): n is any nucleotide
nnnnnnnnnnnnnnnnnnnnnnnnnnnnnnnnnnnnnnnnnnnnnnnnnnnnnnnnnnnnnnnnnnnnnnnnnnnnnnnnnnnnnnnnnnnnnnnnnnnnnnnnnnnnnnnnnnnnnnnnnnnnnnnnnnnnnnnnnnagatttttttctacttccctcagcctctcactctgagatggagacagctccttgcaaaatttaaactgaaataataatctgaaaggtagcgagacatggtgacgttcctactgtttctccatttcagcrtgcaataggacatgcaagacttgttcttcttcmactgcctgccttacgtgcagaaatggcctgatcctgaatcgtaacgggcactgcgtgctatccggacactgctctcgcaccgagtactatgatgagaagactgagacctgcaaaacttgtcataagaaatgttttcactgctcaggaccaactgaacaccagtgtattagttgtgcaaataaccgctatcttttcagtaagtgtctttctcctgtttataggctttattccacgctggcagcatgaaataaacaagcttatrtgacgttcataaaacatttaggactgctttagactat

SEQ ID NO: 95350 - DNA, 527 bp, Chicken  19866894617083_3
cagcrtgcaataggacatgcaagacttgttcttcttcmactgcctgccttacgtgcagaaatggcctgatcctgaatcgtaacgggcactgcgtgctatccggacactgctctcgcaccgagtactatgatgagaagactgagacctgcaaaacttgtcataagaaatgttttcactgctcaggaccaactgaacaccagtgtattagttgtgcaaataaccgctatcttttcagtaagtgtctttctcctgtttataggctttattccacgctggcagcatgaaataaacaagcttatrtgacgttcataaaacatttaggactgctttagactatctaaatattgcaatgttgacctgataagtagaagacttgctcagtgataactactttctgcagagctacctggaaacactttgaaagacagagaaaaatcatcattctgggtcagccactcactggggccaaaggaagacttctaagtagcaacaaatacgaacaaaaatgtattttttttaattcactt

SEQ ID NO: 95351 - DNA, 599 bp, Chicken  19866894617085_1
  misc_feature (1)..(144): n is any nucleotide
nnnnnnnnnnnnnnnnnnnnnnnnnnnnnnnnnnnnnnnnnnnnnnnnnnnnnnnnnnnnnnnnnnnnnnnnnnnnnnnnnnnnnnnnnnnnnnnnnnnnnnnnnnnnnnnnnnnnnnnnnnnnnnnnnnnnnnnnnnnnnnnngcgatattcctcatgtggtaaataactgtttccttagaaggttcctagcatatggaattgctctattttcttctgctctgcagggaaaattatgccacaagaacagtgcttttttgctaattccagtctgcttgaaaataggcagtgctgatggckgttgacaaactytttttggctactcagtaattccacctatgtttcattggttccctgcttttttagagaaggaataaygggaaaagcttaggtctgaaacttaatgtggataagttctctagatagcgacttgctttacgttctgctgtgtttttatagtttgacctgtgtaaactcagtcgtttcaagttttgtctttagcagaaagtacccttgctgtgcggcaacggtattttaagccctcatctttagcagccaagccgtcataaaccctccttatacagactgagcctaattag

SEQ ID NO: 95352 - DNA, 599 bp, Chicken  19866894617085_2
  misc_feature (1)..(132): n is any nucleotide
nnnnnnnnnnnnnnnnnnnnnnnnnnnnnnnnnnnnnnnnnnnnnnnnnnnnnnnnnnnnnnnnnnnnnnnnnnnnnnnnnnnnnnnnnnnnnnnnnnnnnnnnnnnnnnnnnnnnnnnnnnnnnnnnnnnngcgatattcctcatgtggtaaataactgtttccttagaaggttcctagcatatggaattgctctattttcttctgctctgcagggaaaattatgccacaagaacagtgcttttttgctaattccagtctgcttgaaaataggcagtgctgatggckgttgacaaactytttttggctactcagtaattccacctatgtttcattggttccctgcttttttagagaaggaataaygggaaaagcttaggtctgaaacttaatgtggataagttctctagatagcgacttgctttacgttctgctgtgtttttatagtttgacctgtgtaaactcagtcgtttcaagttttgtctttagcagaaagtacccttgctgtgcggcaacggtattttaagccctcatctttagcagccaagccgtcataaaccctccttatacagactgagcctaattagtggaggctcaaa

SEQ ID NO: 95353 - DNA, 599 bp, Chicken  19866894617085_3
  misc_feature (1)..(66): n is any nucleotide
nnnnnnnnnnnnnnnnnnnnnnnnnnnnnnnnnnnnnnnnnnnnnnnnnnnnnnnnnnnnnnnnnngcgatattcctcatgtggtaaataactgtttccttagaaggttcctagcatatggaattgctctattttcttctgctctgcagggaaaattatgccacaagaacagtgcttttttgctaattccagtctgcttgaaaataggcagtgctgatggckgttgacaaactytttttggctactcagtaattccacctatgtttcattggttccctgcttttttagagaaggaataaygggaaaagcttaggtctgaaacttaatgtggataagttctctagatagcgacttgctttacgttctgctgtgtttttatagtttgacctgtgtaaactcagtcgtttcaagttttgtctttagcagaaagtacccttgctgtgcggcaacggtattttaagccctcatctttagcagccaagccgtcataaaccctccttatacagactgagcctaattagtggaggctcaaatcagcgtactgcataaaacaagtccaacaaaactgtattatttgtggctttgctgtttctttagca

SEQ ID NO: 95354 - DNA, 600 bp, Chicken  19866894617085_4
tctgaaacttaatgtggataagttctctagatagcgacttgctttacgttctgctgtgtttttatagtttgacctgtgtaaactcagtcgtttcaagttttgtctttagcagaaagtacccttgctgtgcggcaacggtattttaagccctcatctttagcagccaagccgtcataaaccctccttatacagactgagcctaattagtggaggctcaaatcagcgtactgcataaaacaagtccaacaaaactgtattatttgtggctttgctgtttctttagcatatgggctgctatgrggaaagcttcccgctgtttttaagagcggaatgggaatgtaagtgcaaatcctaatctttttcttgttctaaatttattcttgtatttccatggcatcttatcttgtaatcagacmcgtcacttcagagtcagtcgtgaaatggctattatgccactgaatgttttttgttgggtattagactagaaatgtatttggatatattttttttcagtgtgactgtatatgtgatatgagtagcttatttggacttgacttatgatcttccgatgtgttttgattgggaaatgttgaaagaaag

SEQ ID NO: 95355 - DNA, 600 bp, Chicken  19866894617085_5
tacccttgctgtgcggcaacggtattttaagccctcatctttagcagccaagccgtcataaaccctccttatacagactgagcctaattagtggaggctcaaatcagcgtactgcataaaacaagtccaacaaaactgtattatttgtggctttgctgtttctttagcatatgggctgctatgrggaaagcttcccgctgtttttaagagcggaatgggaatgtaagtgcaaatcctaatctttttcttgttctaaatttattcttgtatttccatggcatcttatcttgtaatcagacmcgtcacttcagagtcagtcgtgaaatggctattatgccactgaatgttttttgttgggtattagactagaaatgtatttggatatattttttttcagtgtgactgtatatgtgatatgagtagcttatttggacttgacttatgatcttccgatgtgttttgattgggaaatgttgaaagaaagtaggaaagagaaatctggtggctccttgattgtgaaaccataagaatgagtgattctttcacatacagaacacctgctttgctgtagccatggaataaagctggagatgaactgca

SEQ ID NO: 95356 - DNA, 600 bp, Chicken  19866894617088_1
gccatggtcaggaaccattcccaatagtctgagaatggggacttggaagctgaaagtctaacagcacgcatgtccagcagctctcagtccctgaaattgttcccaaaggtatttacatgtcttagacatagcttgtatgtctcagctggagaagccagctttgaaaaaagcatggcgtgttttcaggccagttattacctacagatgttaaaagcctatctaacacgaaagacataaagagtaagagctgtttcagggctaacctcatccctttgacttattaaaaatctgactgtttgytccygggaatccgtcctagcttgtctttatttttttataaaacaaacaaagaaacggattgtgtactccacctcacaaatgagaccttttgtgtttcttgtataaagcacataattctagtaatgtctggattgctctgtttcaataccatgcctagtattgaaacagagttgtagccattatttttatgacaagaggataagagtagggaagcactggaacaggttgcccagtgatgtgtgcatgccctgtccctagagacattcaaggtcaggctggaccacggctctgagcaacctc

SEQ ID NO: 95357 - DNA, 600 bp, Chicken  19866894617088_2
tggtcaggaaccattcccaatagtctgagaatggggacttggaagctgaaagtctaacagcacgcatgtccagcagctctcagtccctgaaattgttcccaaaggtatttacatgtcttagacatagcttgtatgtctcagctggagaagccagctttgaaaaaagcatggcgtgttttcaggccagttattacctacagatgttaaaagcctatctaacacgaaagacataaagagtaagagctgtttcagggctaacctcatccctttgacttattaaaaatctgactgtttgytccygggaatccgtcctagcttgtctttatttttttataaaacaaacaaagaaacggattgtgtactccacctcacaaatgagaccttttgtgtttcttgtataaagcacataattctagtaatgtctggattgctctgtttcaataccatgcctagtattgaaacagagttgtagccattatttttatgacaagaggataagagtagggaagcactggaacaggttgcccagtgatgtgtgcatgccctgtccctagagacattcaaggtcaggctggaccacggctctgagcaacctcatct

SEQ ID NO: 95358 - DNA, 600 bp, Chicken  19866894617102_1
aaaatgttcttgcatacaggatcatactgtgatcttcatgcacacaggtgttcagaaatgtatgactttacagtgtaaagtgtatgtatgccactttagaaatacgtaaaggataaagttccttacctgagaagccaaactctaatccagacagaaaacaatttaaaacaagaagaaactaatggagctgttaacagcactcatactggaaagttctttgaatgatcttgactcttggccagaatttgtagagaatgatttttctcagagaatgagtatgaagctgttcaaagcctaagrgacatgaaagaaattagttcactagtagtgcagataaagaagacaatacaaaagaggactgtgagagatacatatctggatagtgtaagagagaaaataagaaaaagcatagggacataaaggaaactggaatggccaaggggtcgagagcaggatgtcataataataagctttttacttgcttatgtaaaacaaaaacatcagacatctccacttgacaccaacatggtcagtccttttttgacagtctcagrgttggtattgttgattgttcatttttgttgcagtagagtgaaagag

SEQ ID NO: 95359 - DNA, 600 bp, Chicken  19866894617102_2
atgatttttctcagagaatgagtatgaagctgttcaaagcctaagrgacatgaaagaaattagttcactagtagtgcagataaagaagacaatacaaaagaggactgtgagagatacatatctggatagtgtaagagagaaaataagaaaaagcatagggacataaaggaaactggaatggccaaggggtcgagagcaggatgtcataataataagctttttacttgcttatgtaaaacaaaaacatcagacatctccacttgacaccaacatggtcagtccttttttgacagtctcagrgttggtattgttgattgttcatttttgttgcagtagagtgaaagagattctggcagttttgacagttgtggacattctgctggacaaagtagtataatgtgtgagtgcacaaatgtgagaacattgaggaaaaaagaagtttcatcgtttcatcaagagcagttatttaaacacattccagggatggcccttaaggaatgcatgcatggtcttcaactaaagatcacatgagaagctagtgccagaagtaggtgttaatatcaattaactgtagctcattctgagctacaacttcaggtc

SEQ ID NO: 95360 - DNA, 599 bp, Chicken  19866894617103_1
  misc_feature (1)..(43): n is any nucleotide
nnnnnnnnnnnnnnnnnnnnnnnnnnnnnnnnnnnnnnnnnnnagaattattcgtgagcacatctatgaagcaacaagtagtgaaagtgaatttaattttacactttaagttacatagcacagtatttgcaggttatgtaatgctacagtaatatcaatcattttactgttttgcatctagaagtttggtattaaaatgcattgtatttggacagtagaaatgctatacaaaagtgtatttgttatttttttttctctatcttacaaacctataaatcttagagggatctgcaaaatgcyattgggaatattctcctacttgttatatgacgttttgagcatgaggcatttgttcttaattgcttgttactgaacagtgttttatagctgtcatgttttatatggatgcgtaccatgcgtttgttgattaaagatctttaagctactcagtattatggttaatgcaaaaatatcttaaacaaattgaggaaggaaaaataaagagttcttaccattagagctgctcaacagaataatggttactttgaagttaattgttcactttttgatctacatgccaagaaaggacaccattacca

SEQ ID NO: 95361 - DNA, 599 bp, Chicken  19866894617111_1
  misc_feature (1)..(197): n is any nucleotide
nnnnnnnnnnnnnnnnnnnnnnnnnnnnnnnnnnnnnnnnnnnnnnnnnnnnnnnnnnnnnnnnnnnnnnnnnnnnnnnnnnnnnnnnnnnnnnnnnnnnnnnnnnnnnnnnnnnnnnnnnnnnnnnnnnnnnnnnnnnnnnnnnnnnnnnnnnnnnnnnnnnnnnnnnnnnnnnnnnnnnnnnnnnnnnnnnnnnntatgcatgtcagaaccagtaatggtcattgtgaggagcagccatgaggactactatatttaatgtgtgccagggctgcactctttctgaacctgcagtcattragaacacttcagaaagttttgataaactgtatgaaccaatagacacaactttctagcagcaaataggtaactgaaggtagattttccttttctgccctaagggttacacgtaaacatgagagaaagacagatgaaaagagaattctggtcatacaatgtgaaaataacgaaactagtcacttcccagcatttgattttatcccatcatgaagaaaaaactattaattctggtataataaaattttactttcagaatcacatttaaatacattaaactactcatttctttcatggcacac

SEQ ID NO: 95362 - DNA, 600 bp, Chicken  19866894617111_2
agggttacacgtaaacatgagagaaagacagatgaaaagagaattctggtcatacaatgtgaaaataacgaaactagtcacttcccagcatttgattttatcccatcatgaagaaaaaactattaattctggtataataaaattttactttcagaatcacatttaaatacattaaactactcatttctttcatggcacacattcattttgtcagtgttaatcttttttccaattattatcctctcaatccttttgcaaacaaaaccaatgcatacaactggctgtgagaatttttgatarcaatgagcagaatgaggtctcaatgaaaaggtcagtccaaatccacacactgcatctttctctatctgttccaaagctgctgtgaagggagacgaagttgagtgtgaagtctgaccctttccttgggtgacaggggatgacagacaagaaaagggaaaggaatttaaaccttagaggagttaagagctgcctcttggcatcagatatttccatgggtattttaaaaaacctatttgcaaacagaagtgtgacatgtttcattttgttcttgttgttttgttgttgtctttgttgtctttt

SEQ ID NO: 95363 - DNA, 600 bp, Chicken  19866894617115_1
cctgtccttccactgaaggaagtgagatttatacaaaaggatctataaagaaactacattggttttcagatccatttcttgtctttcacatattctctcttttccatctttggactagacatgcttgaatgctcagtctccatttgcggtggcagatttaaatgtcattgtatgtctgtctatagagaatacctgccagtgccaattattgttccaggagcacgctttgctgatgcttcattgccccaaatcgtgcattccatactctcttccttggagaataaggaagggacaggtgaygagaagaacaaaaccagacaccagaacagacatcaaatgagaaccatgtatcacacagacataggctaacaaagcacaacgctgtttagaaagtaaagcacaaactgaaccaacaagttgctctgatagaagcagcagtcagtatctcaccacaggagataaagcaatttctgcacctacattataaaacctggtgcgtgccttataactaagttgcccaygtagattttactttctatatgcaactacatttttaagggtaagattttaaatctacagaagcaaaggagggraaaaaag

SEQ ID NO: 95364 - DNA, 600 bp, Chicken  19866894617115_2
acgctttgctgatgcttcattgccccaaatcgtgcattccatactctcttccttggagaataaggaagggacaggtgaygagaagaacaaaaccagacaccagaacagacatcaaatgagaaccatgtatcacacagacataggctaacaaagcacaacgctgtttagaaagtaaagcacaaactgaaccaacaagttgctctgatagaagcagcagtcagtatctcaccacaggagataaagcaatttctgcacctacattataaaacctggtgcgtgccttataactaagttgcccaygtagattttactttctatatgcaactacatttttaagggtaagattttaaatctacagaagcaaaggagggraaaaaaggaaatctactgttttcctgggtttcctttacctctggtgtctaactttgattaaatagaaaaaaaacttagagcataataataataaatgcctaccatcctctactttaagaaaaactgtggaatgggtaaaggagagataattgtgaaagtcagtaactgattactactcagaaagatcaacaaaataacattgtcataattatctaaagtgcattcata

SEQ ID NO: 95365 - DNA, 551 bp, Chicken  19866894617115_3
aggtgaygagaagaacaaaaccagacaccagaacagacatcaaatgagaaccatgtatcacacagacataggctaacaaagcacaacgctgtttagaaagtaaagcacaaactgaaccaacaagttgctctgatagaagcagcagtcagtatctcaccacaggagataaagcaatttctgcacctacattataaaacctggtgcgtgccttataactaagttgcccaygtagattttactttctatatgcaactacatttttaagggtaagattttaaatctacagaagcaaaggagggraaaaaaggaaatctactgttttcctgggtttcctttacctctggtgtctaactttgattaaatagaaaaaaaacttagagcataataataataaatgcctaccatcctctactttaagaaaaactgtggaatgggtaaaggagagataattgtgaaagtcagtaactgattactactcagaaagatcaacaaaataacattgtcataattatctaaagtgcattcatacaactgagtacagcaattcacat

SEQ ID NO: 95366 - DNA, 600 bp, Chicken  19866894617119_1
gatagctaacataagtatagaatggcacgttaaatgaggctttctggtttctcctgactcatccacccttttatgtcagtctttcaacacgatgattctctggacacattaaacatgaatcagtccctttgttttagctgttgagtgcagccctgtatctcattaaagaaactaagtcacaatgaacaatgtcatatttctaaaactttttaatctctcagataaatgcagaccagagaacaggctaagatttttcctgagtaactcactggaaaggaaactgggttttaaaggcaggcrtggtgaatatcaccagtttctaaattgccctgatcagggcatgccactaccacagcagactgaggttgggagatgatcctgtgccagactcagactccaatgccttttgtcctcctggttctttctgtctctttatcttctcccttccatcccacttttctctcattttctgattttatctattctccttcttcacttccctgaattattgcccttaacgccacctaactcttgggtggagaaaagagtgagatacccttgctcatgccccaagtcttccacccaagaagccggaggctg

SEQ ID NO: 95367 - DNA, 599 bp, Chicken  19866894617122_1
  misc_feature (1)..(244): n is any nucleotide
nnnnnnnnnnnnnnnnnnnnnnnnnnnnnnnnnnnnnnnnnnnnnnnnnnnnnnnnnnnnnnnnnnnnnnnnnnnnnnnnnnnnnnnnnnnnnnnnnnnnnnnnnnnnnnnnnnnnnnnnnnnnnnnnnnnnnnnnnnnnnnnnnnnnnnnnnnnnnnnnnnnnnnnnnnnnnnnnnnnnnnnnnnnnnnnnnnnnnnnnnnnnnnnnnnnnnnnnnnnnnnnnnnnnnnnnnnnnnnnnnnnnacagggcacctcgcattgctgcctagggaagagcatgagagaaacagagcagatcsaagtctctgtttccactctctggtktgactaatgctggtttctacttgcaaaataaaccagttctttcttcaaatgagcctgtgttctctgactgcatgtagagcaagtgtgcatgctggattaagagctcagtacggcttttgcaatgccggcgatgctgctttatgcaggaacccatgaaatggcattctttcttgaagtggattttgcagttctagccaaatcaaacattaataacattcagtccacatttccatatgtagatgcttttatcaaaccacattctctttcattgtta

SEQ ID NO: 95368 - DNA, 599 bp, Chicken  19866894617122_2
  misc_feature (1)..(219): n is any nucleotide
nnnnnnnnnnnnnnnnnnnnnnnnnnnnnnnnnnnnnnnnnnnnnnnnnnnnnnnnnnnnnnnnnnnnnnnnnnnnnnnnnnnnnnnnnnnnnnnnnnnnnnnnnnnnnnnnnnnnnnnnnnnnnnnnnnnnnnnnnnnnnnnnnnnnnnnnnnnnnnnnnnnnnnnnnnnnnnnnnnnnnnnnnnnnnnnnnnnnnnnnnnnnnnnnnnnnnnnnnnnacagggcacctcgcattgctgcctagggaagagcatgagagaaacagagcagatcsaagtctctgtttccactctctggtktgactaatgctggtttctacttgcaaaataaaccagttctttcttcaaatgagcctgtgttctctgactgcatgtagagcaagtgtgcatgctggattaagagctcagtacggcttttgcaatgccggcgatgctgctttatgcaggaacccatgaaatggcattctttcttgaagtggattttgcagttctagccaaatcaaacattaataacattcagtccacatttccatatgtagatgcttttatcaaaccacattctctttcattgttatatttcagtgctgctttggtctctc

SEQ ID NO: 95369 - DNA, 599 bp, Chicken  19866894617127_1
  misc_feature (1)..(83): n is any nucleotide
nnnnnnnnnnnnnnnnnnnnnnnnnnnnnnnnnnnnnnnnnnnnnnnnnnnnnnnnnnnnnnnnnnnnnnnnnnnnnnnnnnnttggtcttgattgttaagcattgggattggaaaggtggcttttggtttgtatgaaatgatgttaagataaaggagctaggcaagaatatcctatttagactaatcaagcaaaatgacttctgtgcagagttgatttgagtgtatatatatgtgagagcttctcaggagagaggtgaaattgcccacttcttttttccttattataaaatcacccatrtttatgcacttaaatatttataatactgtaaatacatacaaatatacagatgctttgcttctgttctgtgtttgtaatactgagtagcaccttcacgtaataaatggaaagaaagtttgaagaagtggtttttttattgtactaaagaaaaccacaatatggaagaaaataacatgttatctttattgagataacacttctggtgcaggtaatgttatcatctctgcattataagctacctgatattgtgtaaagagtcactactaggaattattcaacattcagcatctgttcagtgc

SEQ ID NO: 95370 - DNA, 600 bp, Chicken  19866894617130_1
caataaataaaccaatagaccacagtcaacagctggttgttcttaaatatttttgtatccagtgaccttactggagacctttctgaaggtacttgtaagatctctatcaacttcaatacagtagaataaagcttctctcaatgcatccaaaaaaagcagctcagccctcaaaaaccatacaagctggttaatactctctacttattctcgacagttttgacttccattaacagtaacttcaccattacaccaaatctctgaggatgacaatgaactgtttaatgcaaaacttataaaaamatatacataaatttattcacttagcttatcaaagtgaaaatatatgtactagaattaaaaaattcttcccatgccttcccacatactaattatctttaacccataatctaacctgtctgacaagtcctaaagtgaattttcatgttttcctggcctttgaaaatgcaagaaatagcacaaaggaaaattaatcctcctatcaaaattaaacatgacattgtgctgactattcaatttcatgtgaaacagtgaaattctaatactttggagaaggggaaagatgattggcttttaatttgt

SEQ ID NO: 95371 - DNA, 600 bp, Chicken  19866894617137_1
agctgtgtgtttgaggcaaggtaatcaaggcagggctgggtgaggtgacttacttaattggcacgcctgcagctgaagcaagcctggatttcccccatcagtatggcacagtgtggaaaggcaaatggtaccttggcagcagcgtgtttctggcagcattctgtgggtctcactctccaccacactcctgcctgaaagatctcatgcaagacaaacgtcactgctctttcctgtagtgttcagcctccatcaagcgtggtatcactatgcgaggcacagagcagtaagtcaaaatgaaarcttagtaatggaatctacttaattccccatcttctgctcacaaggattgcaagtaatcatagaataatttgagtcggaggggacccttagcagtcagctggtctgacacgtctgcaatgaataggaacayttacagcggatcaggtgctcagagtccctccagcctgaccttgggcacccaccacctctctgggcaacctgtgccagtgcctcaccatcctaactggaaaaaaaccatcttccttatatccaatctaaatctcttttagtttgaaaccatttccccttgtcctatcacaa

SEQ ID NO: 95372 - DNA, 600 bp, Chicken  19866894617137_2
ccttggcagcagcgtgtttctggcagcattctgtgggtctcactctccaccacactcctgcctgaaagatctcatgcaagacaaacgtcactgctctttcctgtagtgttcagcctccatcaagcgtggtatcactatgcgaggcacagagcagtaagtcaaaatgaaarcttagtaatggaatctacttaattccccatcttctgctcacaaggattgcaagtaatcatagaataatttgagtcggaggggacccttagcagtcagctggtctgacacgtctgcaatgaataggaacayttacagcggatcaggtgctcagagtccctccagcctgaccttgggcacccaccacctctctgggcaacctgtgccagtgcctcaccatcctaactggaaaaaaaccatcttccttatatccaatctaaatctcttttagtttgaaaccatttccccttgtcctatcacaacagaccccgctgaagagtctgtccccctttcttacaagccctttaaatactgaggggccactctcaggtctccccagagccctctctcctccaggctgcccagccccagctctcagtttgcccttttaga

SEQ ID NO: 95373 - DNA, 600 bp, Chicken  19866894617146_1
tactaaagctgatggactgccttttagattaagaagtcccacccaactcgaaatggatgggcagcctctctgtgcaaagaaatgagataagatcctgagcaattatatggaattcccttcctctctatcatcctccatctgttgacctcatctttgctctgatggggccactccgtgtaggcgactcaaacagcaagtcagttgttgggctttcttggctctcagcacctcacccacacaaatcctgccaatagtcattgccgtgatgccttcagagttccttccagtgaggaatattgstagagaaataatgggtgggtgtaaggtgctatgttgacaccacatatcccctccttctttcggtctcatgcacgatgaaaggtctccttgctatttctatgcttcctgcattaggatcaygaaggtaccaaatgctccaagtctgtgcccgtccagggacatgtgtgtgtacctgtatcactgctactcagcaagtgaagttggtgttaacaccccaagcaagccgtggttcatccttcacctgtctctgtagatgtaatattgtcaggcaggtctaaccttgccaaaagagggtttgta

SEQ ID NO: 95374 - DNA, 600 bp, Chicken  19866894617146_2
ctctctatcatcctccatctgttgacctcatctttgctctgatggggccactccgtgtaggcgactcaaacagcaagtcagttgttgggctttcttggctctcagcacctcacccacacaaatcctgccaatagtcattgccgtgatgccttcagagttccttccagtgaggaatattgstagagaaataatgggtgggtgtaaggtgctatgttgacaccacatatcccctccttctttcggtctcatgcacgatgaaaggtctccttgctatttctatgcttcctgcattaggatcaygaaggtaccaaatgctccaagtctgtgcccgtccagggacatgtgtgtgtacctgtatcactgctactcagcaagtgaagttggtgttaacaccccaagcaagccgtggttcatccttcacctgtctctgtagatgtaatattgtcaggcaggtctaaccttgccaaaagagggtttgtaaatgccattgacataaggagaactcataatgatagaaattgctcacatctagttttccaagacttgaatatactgggaagttgtttgtaacagcggtggaataacagttagtgctatgct

SEQ ID NO: 95375 - DNA, 600 bp, Chicken  19866894617165_1
gattttctctagttgtaataatgaaatatttctattctgtttgtgggaaaaaaaatggtgtaatttttgcattagatataacgttattttctgtcataagtaagtggatttaattttaccaagtacttagctaaattataagcctggaggaaactctttccagtcaaaaattgtattacacagcacaacagtttttgtttcacttcattcagtgacctgaaacactatcacatttcagaaaatggatgctgtaacacgaactgaagcatccgggagaactgcaaatgtgctctgatgggyaaagctggtcaggaagctgcgaagtgaaagctgatagatgaagaaattctagtttctcatccatgtacaatttatttttctcattcatgttatatataaataagtagcatcaatcatgctttttatttgatgacttagaaattgtctcacctttcacagtgttaacagttgtctaagccctttctattagttttatgatggtacttatctaaaatagctttggatgcaaacaaaataaaaaattagacaagacctagtggcaagtaacagactaaaatagcttatataaaaaatgtaaga

SEQ ID NO: 95376 - DNA, 599 bp, Chicken  19866894617173_1
  misc_feature (1)..(90): n is any nucleotide
nnnnnnnnnnnnnnnnnnnnnnnnnnnnnnnnnnnnnnnnnnnnnnnnnnnnnnnnnnnnnnnnnnnnnnnnnnnnnnnnnnnnnnnnnncgaagagatgctgtatggaatttgtggatgctttcacacaaatgagtgcattctccaaataagttttattggaaattctttttaaaatataaaccatagtgctatcatgtcatcattacttgtattaatttcaattccttttttctatctgcttatattagctaaaattttattggctaagatggcaaagtgttgaattttgtaggatgyagctttttcctttatccagtttggcagtgcttttcaatagtttctgataaaattgcaggcttccaagctgtggaacaaatgcacaaagctgtgttacagtttattgacatttgagtcatatraaagcaaatctgacatttatttaaacaattttgacaggctaataatttgtgtcattagctttaaggcaaatgtcttactactgtcttcagcctgagaatcagttgcatcccgcattgatttctagctttcagtattgacaaatcaatatttctcactctattttaaataaattgcta

SEQ ID NO: 95377 - DNA, 600 bp, Chicken  19866894617173_2
ttcacacaaatgagtgcattctccaaataagttttattggaaattctttttaaaatataaaccatagtgctatcatgtcatcattacttgtattaatttcaattccttttttctatctgcttatattagctaaaattttattggctaagatggcaaagtgttgaattttgtaggatgyagctttttcctttatccagtttggcagtgcttttcaatagtttctgataaaattgcaggcttccaagctgtggaacaaatgcacaaagctgtgttacagtttattgacatttgagtcatatraaagcaaatctgacatttatttaaacaattttgacaggctaataatttgtgtcattagctttaaggcaaatgtcttactactgtcttcagcctgagaatcagttgcatcccgcattgatttctagctttcagtattgacaaatcaatatttctcactctattttaaataaattgctaaaaggaagaatgtctttgactttttgcttttagaaaagtgattactaagtgctmtgttgtaattaataccaatgtttctttgcctccacttactgatggtgtactggaacaactcaaaaggag

SEQ ID NO: 95378 - DNA, 454 bp, Chicken  19866894617173_3
tgcaggcttccaagctgtggaacaaatgcacaaagctgtgttacagtttattgacatttgagtcatatraaagcaaatctgacatttatttaaacaattttgacaggctaataatttgtgtcattagctttaaggcaaatgtcttactactgtcttcagcctgagaatcagttgcatcccgcattgatttctagctttcagtattgacaaatcaatatttctcactctattttaaataaattgctaaaaggaagaatgtctttgactttttgcttttagaaaagtgattactaagtgctmtgttgtaattaataccaatgtttctttgcctccacttactgatggtgtactggaacaactcaaaaggagatgaatcacagaggcactttgtccttctcattaaatcaatcaagtttcaaaagctgttcagctaaaattctaaaatcccaagttt

SEQ ID NO: 95379 - DNA, 530 bp, Chicken  19866894617185_1
agaatgatggattatttccactggaatgcctcaaatggatgataacctttcttttgagacttatatgtaaaaactaaatgtcactacagcttctgtacatttattaggagctatgtctattgtgaatggtatcattggaagtcttgcttttgtctctgatgcaagtagggttagcttgagaattagtttgatgactccaagatgtaggcatttctgtagagttcctctggtatgtgttgtctcctctctggtcaagatgccactgcctggtttattcagagaagatagttgccttttctytcttccatgtgaaaaataaccacagtacataagagctgtgttattaacmtttcacawaagtttctattatcagaaatgccaagtataaagcacaattccaaagctactagaaggctacattccatgggcaagaggcaggaactgaataaaatattcacatttctgtcttcatttagaaatggcatataccataatgcttgtaattataactatgctaattttctcctatt

SEQ ID NO: 95380 - DNA, 481 bp, Chicken  19866894617185_2
tcttttgagacttatatgtaaaaactaaatgtcactacagcttctgtacatttattaggagctatgtctattgtgaatggtatcattggaagtcttgcttttgtctctgatgcaagtagggttagcttgagaattagtttgatgactccaagatgtaggcatttctgtagagttcctctggtatgtgttgtctcctctctggtcaagatgccactgcctggtttattcagagaagatagttgccttttctytcttccatgtgaaaaataaccacagtacataagagctgtgttattaacmtttcacawaagtttctattatcagaaatgccaagtataaagcacaattccaaagctactagaaggctacattccatgggcaagaggcaggaactgaataaaatattcacatttctgtcttcatttagaaatggcatataccataatgcttgtaattataactatgctaattttctcctatt

SEQ ID NO: 95381 - DNA, 473 bp, Chicken  19866894617185_3
gacttatatgtaaaaactaaatgtcactacagcttctgtacatttattaggagctatgtctattgtgaatggtatcattggaagtcttgcttttgtctctgatgcaagtagggttagcttgagaattagtttgatgactccaagatgtaggcatttctgtagagttcctctggtatgtgttgtctcctctctggtcaagatgccactgcctggtttattcagagaagatagttgccttttctytcttccatgtgaaaaataaccacagtacataagagctgtgttattaacmtttcacawaagtttctattatcagaaatgccaagtataaagcacaattccaaagctactagaaggctacattccatgggcaagaggcaggaactgaataaaatattcacatttctgtcttcatttagaaatggcatataccataatgcttgtaattataactatgctaattttctcctatt

SEQ ID NO: 95382 - DNA, 600 bp, Chicken  19866894617194_1
tcttgtcactatgcctgcaccagtggggtttttgtttagtgatcacagaatcataggggttggaagggacctctagagatcaacaagtccaactccctgctaaagcaggttccctccagtaggttgcacaggagagtgtccaggtgggttccgaatatctctggagaaggagactttacagctgctatgggcagtctgtggaattcctgtgttccaatttgtgcctgttgcccattatcctgttgatgggtgctgctgtcaagagcctggccacatccccttgatactcaccccttatakatttacaaatgttgttaatgttcccctctgtcttctccaggctttcagccttttctcataagggagatgctataggccccctaattatctttgtggacctctgctggcctctctgaagttccctgtttttcttgtgctggggagtccagacctggacacagtactacaagatcaggacttagaaatgctgactgtttctgaaagccttcttacggatttattgaatgtaacttgttttttccctttcatttatacaccacctaatttcaacatttggtttttcatgggctgctgtattta

SEQ ID NO: 95383 - DNA, 600 bp, Chicken  19866894617206_1
tgtgtagatctctgcagatctgggaaaagtgtatttatgggattaaattggatgtaaggagctgaagagaaaactatgtgactagaggagaaagagcaagatacactgtaataacttcatttaagaggctggaggaaatccatgcagatgtgagagttgaggtgcaacagtgtgcatcttgttgggaaggcatgcacagaagcttctgtgtcaggtcttcacactgagtgcattgacagagctgtctacgtagttccttttccccatgttgagagcatctaattttcatagtcgaagacygggtctaaaacactgcaactgctcagtttcccctacgctatgaaataccatctttgctcaattactggaaagtcaccctcccacagggagccatggagccataatggagttgaacacaaacatttgttttgtttaaaagccctggtgtaacattgctgtgcaacttttgaaatgtcagttcctgtaaatgctctgagcctgagaccaacagtgcagaaagcgctggaagaacccgttgtggaagtgaggtttaccaacctcttcaatgtttcatgctagcttcacaatgatctctgtggc

SEQ ID NO: 95384 - DNA, 600 bp, Chicken  19866894617221_1
tttgtgatgggatgattcatatcaaagaaaagactgcatctcttcaatgattagaacaagaatctagacatgtatctcctatgactatgtctgaattgtaaatgtgaattccactgacatagacagcaactgaattttatgtcttcgtagagatactcttttgctactattttgttaaagtagaatatgacctggtacgttttacacaagttaaagaagtgaatgatttctttcaaaatctctgaaatttcaagtgattgctttgctataaaaaatatactttgtgtatgttccattttwatattaatatatatatwtttacatatcatctataaatctcactgtacgttattgcaatagtcagcttgtacatttaaagcattctcaagagcctcacaaaaaacaaacaaaaaaaccccccaacaaacagaagcactgaataagcatgctggattacaaaaatattgcagatttatgggaagatagagacctccagaattttacacacagcacgtgcatgcatgcacgcacacacaatgacataacacatccccaagtcaacttttcaactacatcaatgaaagcattaaagatatgaaa

SEQ ID NO: 95385 - DNA, 584 bp, Chicken  19866894617221_2
catatcaaagaaaagactgcatctcttcaatgattagaacaagaatctagacatgtatctcctatgactatgtctgaattgtaaatgtgaattccactgacatagacagcaactgaattttatgtcttcgtagagatactcttttgctactattttgttaaagtagaatatgacctggtacgttttacacaagttaaagaagtgaatgatttctttcaaaatctctgaaatttcaagtgattgctttgctataaaaaatatactttgtgtatgttccattttwatattaatatatatatwtttacatatcatctataaatctcactgtacgttattgcaatagtcagcttgtacatttaaagcattctcaagagcctcacaaaaaacaaacaaaaaaaccccccaacaaacagaagcactgaataagcatgctggattacaaaaatattgcagatttatgggaagatagagacctccagaattttacacacagcacgtgcatgcatgcacgcacacacaatgacataacacatccccaagtcaacttttcaactacatcaatgaaagcattaaagatatgaaac

SEQ ID NO: 95386 - DNA, 600 bp, Chicken  19866894617246_1
tgtacgtcttatatgaatgccccttccaccacttcttgttttctctaattatttcggaaagcattcttctgtgatgacacatgagaaatgcattgattagagatggatggaatcacagtttggtgtagttggtaatattcgttaactgacttagaaaactaaaaaatataagtgatatggaaatagtttgagtgatgaaggcttaatatggtgcccattcaagcatgggaaatcctcctgctgatttctgtctacttttgatcactagctgtttgaatcttggatttatattgtcttaaragttgctgctgtcatctgttaaacttgccatgttatattttatattaaatctgtgaaggtgactgtcttcctttgcttttactatagtagatatgaaaggacaccttagctaaggagtttggatcttacggcgatacaaataataataaacatattttttatgtgtttaaatgaggttttttttcatgtcagctgtgtatactttgaacacctatctgcatctgcttgggcttttataggacacatgcaattgtttattgaaacagaagactcccatacagtgagatccttatgtatatc

SEQ ID NO: 95387 - DNA, 600 bp, Chicken  19866894617294_1
taatggagtctgagccaccattgttcctgcaaatagccagagtaccgaagaagatgggtgctcttgtccaacttttcccaagaaggtggctgagatcttggctaagcatctggtgtgcaagtgatggaaaggaggtggatcagtctcttctccatagtgaccagcaacaggacctgagggaatggcatggagctgtgtcagggaggagcaggtgggggttagggaacggctctcccacagagggcagtgggcatggaacaggctgcacagggtagtgggcatggccccaagcacagattycaaggagcatttgtacactgctctcagaaatcgggtttgatgttgggtggtcctgtgtagagcctgggcttggactcagtgatcctgtgagccccttccaactcagaaatattctgtaattctgtggttctctgaactgacaatgccagctctttttgttgtatctcacaagtaagatttctcctagtgcagcaatttatttctagtctctatgtgacacctagaagttccatggacctcagccccaccttctcttcatgccaaatcatatccactttaattttttgtctttagtggctc

SEQ ID NO: 95388 - DNA, 599 bp, Chicken  19866894617297_1
  misc_feature (1)..(109): n is any nucleotide
nnnnnnnnnnnnnnnnnnnnnnnnnnnnnnnnnnnnnnnnnnnnnnnnnnnnnnnnnnnnnnnnnnnnnnnnnnnnnnnnnnnnnnnnnnnnnnnnnnnnnnnnnnnnncgggctaaattttgttcagtgcctcttggagatctaagactagactgtactgcttacactgaggtattccacatgtacaaagaagccaaatcaaatgcaaaggattcaaacacaaagagttaagcaatagactctagctggtgagggactttccctccatgttagggaacatagagttcagccttcatggmggaattgtttgatcatgctgaccctggactgattccctggctgatgcaagcaggcataactccattaaagtcaatttatgtcagctgaggatcaggcayacaaattttatttcaattccccagagaccacatattgtcccaagctcactgaatcatgaaattaatttatgtactgaactataaaattaatttatgaaaatccaatccatgattactagaaaggaaagagagttrataggattagtggtaggaaacagaagtttgagcatcccatcaaacttgcccatcgacaaccaatc

SEQ ID NO: 95389 - DNA, 599 bp, Chicken  19866894617297_2
  misc_feature (1)..(10): n is any nucleotide
nnnnnnnnnncgggctaaattttgttcagtgcctcttggagatctaagactagactgtactgcttacactgaggtattccacatgtacaaagaagccaaatcaaatgcaaaggattcaaacacaaagagttaagcaatagactctagctggtgagggactttccctccatgttagggaacatagagttcagccttcatggmggaattgtttgatcatgctgaccctggactgattccctggctgatgcaagcaggcataactccattaaagtcaatttatgtcagctgaggatcaggcayacaaattttatttcaattccccagagaccacatattgtcccaagctcactgaatcatgaaattaatttatgtactgaactataaaattaatttatgaaaatccaatccatgattactagaaaggaaagagagttrataggattagtggtaggaaacagaagtttgagcatcccatcaaacttgcccatcgacaaccaatccagttagctatgccccgagagtaacacgaagtggcaagtggcagctgaagtgactgcagggagagctcacacaacagagcagtgggaatagttcagcta

SEQ ID NO: 95390 - DNA, 600 bp, Chicken  19866894617297_3
aatagactctagctggtgagggactttccctccatgttagggaacatagagttcagccttcatggmggaattgtttgatcatgctgaccctggactgattccctggctgatgcaagcaggcataactccattaaagtcaatttatgtcagctgaggatcaggcayacaaattttatttcaattccccagagaccacatattgtcccaagctcactgaatcatgaaattaatttatgtactgaactataaaattaatttatgaaaatccaatccatgattactagaaaggaaagagagttrataggattagtggtaggaaacagaagtttgagcatcccatcaaacttgcccatcgacaaccaatccagttagctatgccccgagagtaacacgaagtggcaagtggcagctgaagtgactgcagggagagctcacacaacagagcagtgggaatagttcagctacagtccctaaggagctctaagtcagggctgttgatgtgggtgagccaaaaagctcctgccaaagtcccccttccggaacacagtgaggacagcgagcagctgcacccagcaggcgagcttcgaagaatctaagaac

SEQ ID NO: 95391 - DNA, 600 bp, Chicken  19866894617300_1
taatgccaattgtgcaacacaagaagagcacttcacctgtttggggttttgagactttgatgtaggtttggaaaatgagcctgaaaacacaaagtcaaaacattcagattgtaaacaggcgaacaccactttagaaacatattccataacgggcccattttgcaaccaaaataattcaaatgctagcaagaatcatcccaattccataaatggttcaccaggagattaaccaaggtcacgttctcttacattgagacttttaagattcctcccctgaaaagcctccctctagggcaccarccacattatgaagttcagcgttcctgcacatcagcacaacctacatcaaagcacgctacagcctgccaagcgctgactgcccaaggagaggccgcatgacttctaagtgagagatatccrcatccaagagcctcctagactgggtgagagctgcagctggatgytcagagataactgccaactcattaaaatccaacattaaaagtttattaaatatgcaagcattaatggaattggactagcagctatttaggcagataaaattcaacacagcgtgtcctgcagctcctgttatcgcta

SEQ ID NO: 95392 - DNA, 580 bp, Chicken  19866894617300_2
gaacaccactttagaaacatattccataacgggcccattttgcaaccaaaataattcaaatgctagcaagaatcatcccaattccataaatggttcaccaggagattaaccaaggtcacgttctcttacattgagacttttaagattcctcccctgaaaagcctccctctagggcaccarccacattatgaagttcagcgttcctgcacatcagcacaacctacatcaaagcacgctacagcctgccaagcgctgactgcccaaggagaggccgcatgacttctaagtgagagatatccrcatccaagagcctcctagactgggtgagagctgcagctggatgytcagagataactgccaactcattaaaatccaacattaaaagtttattaaatatgcaagcattaatggaattggactagcagctatttaggcagataaaattcaacacagcgtgtcctgcagctcctgttatcgctattatgtaggctgcccttttgcagtgtccatgaaagggttcgcagtgctagccaaggcagcgaaaccctccatctgttctagtttactcaggtcacattca

SEQ ID NO: 95393 - DNA, 536 bp, Chicken  19866894617300_3
accaaaataattcaaatgctagcaagaatcatcccaattccataaatggttcaccaggagattaaccaaggtcacgttctcttacattgagacttttaagattcctcccctgaaaagcctccctctagggcaccarccacattatgaagttcagcgttcctgcacatcagcacaacctacatcaaagcacgctacagcctgccaagcgctgactgcccaaggagaggccgcatgacttctaagtgagagatatccrcatccaagagcctcctagactgggtgagagctgcagctggatgytcagagataactgccaactcattaaaatccaacattaaaagtttattaaatatgcaagcattaatggaattggactagcagctatttaggcagataaaattcaacacagcgtgtcctgcagctcctgttatcgctattatgtaggctgcccttttgcagtgtccatgaaagggttcgcagtgctagccaaggcagcgaaaccctccatctgttctagtttactcaggtcacattca

SEQ ID NO: 95394 - DNA, 600 bp, Chicken  19866894617302_1
cagaaatctgctcatgcagtcttctcgtgtgcaaaagtaagggatgctgagtcttcagcttgcacaaacccacagcagacaattaacctaactcaggtgtttatgaaactagtttcagaattgggttgggttggatggggccctgggcagcctgctttgggaccaggtctgggggttggtggctgtgcctatggtaggggttggaacttggtggtccttggggtcccttccaacccaagccattctatgattcagtatgaagcatgcataagattgagtgtgtacctgcttttgtgctgytgtagcacatcaaggaggcgattgtgtctttggctggcatgctgtaggagagaacgggaggcgcttcaagaagcactgagggtttgatctgcaattaaaggccttaatgtcttcctgcaggattagggaattgattctaaacggagtgacaggccttctgctcttcacacagcaatgtgccarcgtttgaaacttctaatggatttttttttycccccctcgaaagcatttcagagcacaacgccacaggtttgagcgtggtggaaacagcagtgtgagtgatgctttgtgtgtctgcag

SEQ ID NO: 95395 - DNA, 600 bp, Chicken  19866894617302_2
tgtgcctatggtaggggttggaacttggtggtccttggggtcccttccaacccaagccattctatgattcagtatgaagcatgcataagattgagtgtgtacctgcttttgtgctgytgtagcacatcaaggaggcgattgtgtctttggctggcatgctgtaggagagaacgggaggcgcttcaagaagcactgagggtttgatctgcaattaaaggccttaatgtcttcctgcaggattagggaattgattctaaacggagtgacaggccttctgctcttcacacagcaatgtgccarcgtttgaaacttctaatggatttttttttycccccctcgaaagcatttcagagcacaacgccacaggtttgagcgtggtggaaacagcagtgtgagtgatgctttgtgtgtctgcaggttggatgtggtcctttaccgaaagtgccagggcgatgcctcccgcctctgccatacccatggctggaatgagaccagcgagctgatgccccccaggggctgtgttctcctgcttgtacaggcatgcctaccgcacagaggagcagggacggagggtgagtgctggcgtgcagcttactgctg

SEQ ID NO: 95396 - DNA, 600 bp, Chicken  19866894617302_3
gtccttggggtcccttccaacccaagccattctatgattcagtatgaagcatgcataagattgagtgtgtacctgcttttgtgctgytgtagcacatcaaggaggcgattgtgtctttggctggcatgctgtaggagagaacgggaggcgcttcaagaagcactgagggtttgatctgcaattaaaggccttaatgtcttcctgcaggattagggaattgattctaaacggagtgacaggccttctgctcttcacacagcaatgtgccarcgtttgaaacttctaatggatttttttttycccccctcgaaagcatttcagagcacaacgccacaggtttgagcgtggtggaaacagcagtgtgagtgatgctttgtgtgtctgcaggttggatgtggtcctttaccgaaagtgccagggcgatgcctcccgcctctgccatacccatggctggaatgagaccagcgagctgatgccccccaggggctgtgttctcctgcttgtacaggcatgcctaccgcacagaggagcagggacggagggtgagtgctggcgtgcagcttactgctgttccttctgtgatgtgctggtcgcagcacg

SEQ ID NO: 95397 - DNA, 599 bp, Chicken  19866894617306_1
  misc_feature (1)..(108): n is any nucleotide
nnnnnnnnnnnnnnnnnnnnnnnnnnnnnnnnnnnnnnnnnnnnnnnnnnnnnnnnnnnnnnnnnnnnnnnnnnnnnnnnnnnnnnnnnnnnnnnnnnnnnnnnnnnncaacttggtgccacccctctctcacacagcactaggaagtatctgcgtatcagtaaaagtatgatgcagtaaagatgaaggcaaataaatgttcatattgaagtcctgctaagagggcaatctacatgattagaccatttatctcatttctcagtgaccatcagacaccagaacaactgaaatcctgttttytgctacagccttgtagtgatggcaacattcccagtatccgagagcctaaaaacatgtcttgtggtgttcaaaatgttggcctatccagggggatttgcatctgcatgcactcagtgtctattgtattaaagcggtgattcatagcttctattgcaaggccacaayggaatcttcctccccgtatgaatatataacttggcttcctattttatcatcttttggcatcctctttatcatcttctcctccctctgtagacttgcaggctgactagagctgaacggaggacagacagcctgga

SEQ ID NO: 95398 - DNA, 600 bp, Chicken  19866894617306_2
agtatgatgcagtaaagatgaaggcaaataaatgttcatattgaagtcctgctaagagggcaatctacatgattagaccatttatctcatttctcagtgaccatcagacaccagaacaactgaaatcctgttttytgctacagccttgtagtgatggcaacattcccagtatccgagagcctaaaaacatgtcttgtggtgttcaaaatgttggcctatccagggggatttgcatctgcatgcactcagtgtctattgtattaaagcggtgattcatagcttctattgcaaggccacaayggaatcttcctccccgtatgaatatataacttggcttcctattttatcatcttttggcatcctctttatcatcttctcctccctctgtagacttgcaggctgactagagctgaacggaggacagacagcctggagtctctgccgctgtgacatccttcactggtgtgtgccactgcatgcccagggcacagactgcccagtggatgctcagggacaagctgaactcaccattaacctccctaccctatgagcagagcagaggactgacgcatgaggctgactcactctgcatgcactttc

SEQ ID NO: 95399 - DNA, 599 bp, Chicken  19866894617309_1
  misc_feature (1)..(12): n is any nucleotide
nnnnnnnnnnnncctgaagaagaatatagggcgttatgcatctgctagacagttttgagtgtctcaaggtttgatagaaaaatttgaagtgattgttaaactctttcaaatgtttatgctgtgtttacatgaaccacagtagactgcagaatgccacatgctgtgcaaggcctactggctgaaaggctgtacaaacatctatgtgtaagtgtgtatggccaggagaattcctttggagaagattgattgcagttactttggtccaacttctgagatgaaagctggatgaatactcaaacrttaaatgcgtgctgaaattgatatcagaaggtgcatgtgaaggctgctagaattagaattatttttatttgaaggcatcttttttttcctgttagaatactttaaaactgaagtctactcttgtgatatataggtttattccatcacaattttcttcaaatttaaaataactgccaaaacagtgatttcacaaaagcaatgcatgctagtttctgaaggctggttgttgccagtgttcatgttacgggtatgtggttattataagctaatcagtcatatttctgcctgattttttttat

SEQ ID NO: 95400 - DNA, 599 bp, Chicken  19866894617312_1
  misc_feature (1)..(7): n is any nucleotide
nnnnnnntaaaaacacctctcccttgcccccatcctcttctacctccttacctgagcagtgcaggagaataggggctactgtcagttcataacattgctgctactccctcatggagccctctcctatttcctgtagagctactctgaagacagcttaaaatacaaaagggtgtgttttgcaaggcctggaacctggttcagatctaattccatgcccaggacaagcttagtggaaggcttccatgaagtcactccttcatattaggtcaatgcacagcactcactgcatatgtggccaayggagacaatacaccccaatgagaagaactccaccactcctactagcttccaagaactcacaagctctccaattattatacacattacctggtcagcacccatgttcttaaagttgtagagagagagatattttagtttaaagctgctaagttgagtctctctggacccaacatccatggtcaaaaatgtcaactaaaatccattaatttcaaatctacttacctcagtataattgaaatgcaaatctcagtgaaacatcttggctaaacaaatgaatttctctttgaatcacagtgatg

SEQ ID NO: 95401 - DNA, 599 bp, Chicken  19866894617331_1
  misc_feature (1)..(133): n is any nucleotide
nnnnnnnnnnnnnnnnnnnnnnnnnnnnnnnnnnnnnnnnnnnnnnnnnnnnnnnnnnnnnnnnnnnnnnnnnnnnnnnnnnnnnnnnnnnnnnnnnnnnnnnnnnnnnnnnnnnnnnnnnnnnnnnnnnnnncttgcgtgttggcatgggggtgggcagggaaggaaagaaaaaacccaacacccaactctgctcacgtaggaaatcaggtggtttgcacaccatgtgagaatatttcttcagcacagagctggcagggtggcaatgttgactaactctttacagctgcattttcctgytggattgttgatcccaactgagtattggctcacctcatgttgttaccaaactcccgttgcgtgatgcgttgcgttggtgccgtcacccctgcttactcattgcaagagactgcagggcaacatagatatgtctgagtgctttttatgaccaagcaaaattccactggagctatgtacacacctgaataactgctacttaaaaggctggaacagacctgagttgtcktagtctttcataatcctgtggcagtacctggtaccaaatagcacaggtgtctttrtgtagacaggaggtgtgc

SEQ ID NO: 95402 - DNA, 600 bp, Chicken  19866894617331_2
gtgagaatatttcttcagcacagagctggcagggtggcaatgttgactaactctttacagctgcattttcctgytggattgttgatcccaactgagtattggctcacctcatgttgttaccaaactcccgttgcgtgatgcgttgcgttggtgccgtcacccctgcttactcattgcaagagactgcagggcaacatagatatgtctgagtgctttttatgaccaagcaaaattccactggagctatgtacacacctgaataactgctacttaaaaggctggaacagacctgagttgtcktagtctttcataatcctgtggcagtacctggtaccaaatagcacaggtgtctttrtgtagacaggaggtgtgcaacttgctgatagctgttggcatgtttggcctgcgtggttggccagacttcagctgaagggagggcaggaggtaggacaagcggcttcaaactaaaagagggtaggtttagattagatacaaagaagaaattctttactcagagggtggtgagacactggcacaggctacccagatgagctgagggtgccccgtccctggaagatgtgcaaggccaggttggatggg

SEQ ID NO: 95403 - DNA, 600 bp, Chicken  19866894617331_3
tacagctgcattttcctgytggattgttgatcccaactgagtattggctcacctcatgttgttaccaaactcccgttgcgtgatgcgttgcgttggtgccgtcacccctgcttactcattgcaagagactgcagggcaacatagatatgtctgagtgctttttatgaccaagcaaaattccactggagctatgtacacacctgaataactgctacttaaaaggctggaacagacctgagttgtcktagtctttcataatcctgtggcagtacctggtaccaaatagcacaggtgtctttrtgtagacaggaggtgtgcaacttgctgatagctgttggcatgtttggcctgcgtggttggccagacttcagctgaagggagggcaggaggtaggacaagcggcttcaaactaaaagagggtaggtttagattagatacaaagaagaaattctttactcagagggtggtgagacactggcacaggctacccagatgagctgagggtgccccgtccctggaagatgtgcaaggccaggttggatgggggccgtgggcagcctgatctggtgggaggcagctctgcctacagcagagggttgg

SEQ ID NO: 95404 - DNA, 599 bp, Chicken  19866894617333_1
  misc_feature (1)..(212): n is any nucleotide
nnnnnnnnnnnnnnnnnnnnnnnnnnnnnnnnnnnnnnnnnnnnnnnnnnnnnnnnnnnnnnnnnnnnnnnnnnnnnnnnnnnnnnnnnnnnnnnnnnnnnnnnnnnnnnnnnnnnnnnnnnnnnnnnnnnnnnnnnnnnnnnnnnnnnnnnnnnnnnnnnnnnnnnnnnnnnnnnnnnnnnnnnnnnnnnnnnnnnnnnnnnnnnnnnnnnaacctcctttcaggtcgctgtagagagcgatgaggtctcccctgagcctcctcttcttcagactgaacaatcccagttccctcacccrctccccataagacttgtgctccagatcccccacagcttcgttgcctttctctgggaacactccagcacttgcaggccttctccaggtcatcacatgccctctccctcaggaggcctgtatccactgggaggtttttcagatgcctctagtcagacggttagtaagcagttacccatgcactaaacaatctctagatccctccaaactaagttattatatcatctaccagaaaaagagatactttagccttaaattgaacaagctcactgtaggtatctctttgtgattttaaaacaata

SEQ ID NO: 95405 - DNA, 599 bp, Chicken  19866894617340_1
  misc_feature (1)..(4): n is any nucleotide
nnnnctagaataataataaaaaaaaaaagcagaattttgtaaagtgttttctgtccatcagcacattttcatctgctctgacactcaaggttccttcatcttccccctcacttgtccaaaccagcataagcacctcagtccgcagatgtccacggtcaattgcaggcccctccaccttccagaggcacgaccacctccccagcccctccaggccctgccaaggggaataggggaatgccagtagtgggctatcgtgggattgctctgacatggaaatcccagtagttttaagcatgcagmccgttggttctctctccttttctgcacattcacccacatctcagtctcttatatatttatatataaaccccctccatgctactatttctgttatatcctttccctcccacctcatgcacccattagaaatttgaaagcctctgaatttcagaagcatgtgaaaagttgttcgtcactgtctggtcccatctgcttctgcatatacatacggcaagcagaaatttctttatgaaatgttcctgctgagcatttccacagctatgtcccaaaccacacactaattggcttctacacctaca

SEQ ID NO: 95406 - DNA, 600 bp, Chicken  19866894617357_1
atatctatatatccataaccctccttaaagccatcacaagaatttctcagatgttccagcacttcgagcatcaataagcagcagggccacggtcaacctgccccatcctccgcctcaccccgtcaagctgcatgtctccagagtgagagacatctcattcatcacataaacgttgttcttctttccacaagctcctttgtgctgtaaccctgtggttgccatctctgacttttgaaaatgttgctttgaagagccatcaccagcagccttccacagcaagtcacgaaagtctcctgggarcaacactggragtttgaggggagcaacaggtcgagtaaatccttgaggtctctttcagtgctgctttcctgggtcactggttgcagtcattaacatactttactgttgctctgtatttgctctgtgcaaatacagaaatggcaggtgcttagattttacagatacgacaattctttgcttctgtagaaactttgtgattagctgtgtgtcaggtactgactcttttccagctcatacagcatctacactccagaacaaagtccgtacatgcagaattacctgtgaataaatacaaggagg

SEQ ID NO: 95407 - DNA, 600 bp, Chicken  19866894617357_2
atccataaccctccttaaagccatcacaagaatttctcagatgttccagcacttcgagcatcaataagcagcagggccacggtcaacctgccccatcctccgcctcaccccgtcaagctgcatgtctccagagtgagagacatctcattcatcacataaacgttgttcttctttccacaagctcctttgtgctgtaaccctgtggttgccatctctgacttttgaaaatgttgctttgaagagccatcaccagcagccttccacagcaagtcacgaaagtctcctgggarcaacactggragtttgaggggagcaacaggtcgagtaaatccttgaggtctctttcagtgctgctttcctgggtcactggttgcagtcattaacatactttactgttgctctgtatttgctctgtgcaaatacagaaatggcaggtgcttagattttacagatacgacaattctttgcttctgtagaaactttgtgattagctgtgtgtcaggtactgactcttttccagctcatacagcatctacactccagaacaaagtccgtacatgcagaattacctgtgaataaatacaaggagggctttttttc

SEQ ID NO: 95408 - DNA, 600 bp, Chicken  19866894617360_1
ccagcccacaacagggggttgaaaatggatgggctttaaggtcccttacaccccaagacattctgtgattctgtgatatttgctttttagtaaaaactgctccctgccaaagaaaattacctggttgctgggccacacaaagtgtgattttcttcctgcctcagcctaagcattggagagtgtaatgctgaagctcaggtttcccctttctttttgtgaatgttatggcacagaagcttatgggttacacttcctctttaccctggacaaactgatatttaaattattccctgtacggasgaaaggyttcckcctaggaatgagaagggctctgcccacagagattagcctgtagaactgtggtgagagcaaagtcatgaaaaataaggatcaaggttctgcagagaacttgagcaagaaggaaggaaagcacaaattctacccccaatttatttcatgacaggaaattgacctttcctgtaaatatcaagaaaagagaggtgctctcctgaagcccaattagctgctcaataccctgagaaaatgtcttcccactcctccctaaggattttttccagcagcaatgtgctttgcatgcat

SEQ ID NO: 95409 - DNA, 600 bp, Chicken  19866894617360_2
acaacagggggttgaaaatggatgggctttaaggtcccttacaccccaagacattctgtgattctgtgatatttgctttttagtaaaaactgctccctgccaaagaaaattacctggttgctgggccacacaaagtgtgattttcttcctgcctcagcctaagcattggagagtgtaatgctgaagctcaggtttcccctttctttttgtgaatgttatggcacagaagcttatgggttacacttcctctttaccctggacaaactgatatttaaattattccctgtacggasgaaaggyttcckcctaggaatgagaagggctctgcccacagagattagcctgtagaactgtggtgagagcaaagtcatgaaaaataaggatcaaggttctgcagagaacttgagcaagaaggaaggaaagcacaaattctacccccaatttatttcatgacaggaaattgacctttcctgtaaatatcaagaaaagagaggtgctctcctgaagcccaattagctgctcaataccctgagaaaatgtcttcccactcctccctaaggattttttccagcagcaatgtgctttgcatgcatttcttga

SEQ ID NO: 95410 - DNA, 600 bp, Chicken  19866894617360_3
agggggttgaaaatggatgggctttaaggtcccttacaccccaagacattctgtgattctgtgatatttgctttttagtaaaaactgctccctgccaaagaaaattacctggttgctgggccacacaaagtgtgattttcttcctgcctcagcctaagcattggagagtgtaatgctgaagctcaggtttcccctttctttttgtgaatgttatggcacagaagcttatgggttacacttcctctttaccctggacaaactgatatttaaattattccctgtacggasgaaaggyttcckcctaggaatgagaagggctctgcccacagagattagcctgtagaactgtggtgagagcaaagtcatgaaaaataaggatcaaggttctgcagagaacttgagcaagaaggaaggaaagcacaaattctacccccaatttatttcatgacaggaaattgacctttcctgtaaatatcaagaaaagagaggtgctctcctgaagcccaattagctgctcaataccctgagaaaatgtcttcccactcctccctaaggattttttccagcagcaatgtgctttgcatgcatttcttgaagatt

SEQ ID NO: 95411 - DNA, 600 bp, Chicken  19866894617385_1
tatacactcttccagcattgaaatgtgaaacaaaagaaaaccttgcatcttgtttaaggatatctgcatgacccagctacaagtagtaaaggaatcagaggggataaagctttgaaggttagtcaaatcacctgcatcaaacacagttcaatttgattcaaggtgatttgaagaagtaatttacacaaaatattctgttaatacttacttgcaacaccacaggttagcttaggtttcatttcctctgcttttttactgttgttatgaggagtcactcaatctgtaaacacacatagaaartaggaaaaaatattacaaaatgtaaaaaaggagtgagaattttttttttttatgcattcaaggtttcacatggcagaaggaaatgtagaagaatggagctcattccttcagtctgccagttttcttaagagtttctaggtacaatctttaaatgcattttgtctcttacccatcgataaaatggggcaaatcatgatttctttttgctttcactggcatcctttgaaaaaatgtgcgtcacgcattgtaatggatgctttagtaatgggcagcatagaagaatcaaagacagcagtttag

SEQ ID NO: 95412 - DNA, 600 bp, Chicken  19866894617389_1
atagaggtggatatcaactgttaagtcatgagggaggctactctgctttatgctttcatgggatttttgtctctcttatctggattgaatatagttgtcaagatccacatgtctgatgagttatgagctgctggcagcatccattctttcagtacagtatcagtaagtcagatttctatcactttaatatcttgactttcagaaatgggaatgagcctgaaatgagcctgagaactgctcacagctgtaatgattttgatcatcttcccaagatcaagcattaacagtttgatgacaggrttagataaagtctgaggaaaaatgctacaaattccatgctattcactgtttgttcattattattctcccttctaatgcaagtgttatgattgcaatttgtgcttataaaaaagtttttctaaaggtaagtattctaagtcaagtaaagggatagaaataagatttcaagatgagctgagagtatttgtgcagcagaagaatggtggccgttttggtggttcaactgtgcayttgtagctaaaccctatgcagattgttgctgtggttgccctttaacttttatttttagtaggatgctgg

SEQ ID NO: 95413 - DNA, 555 bp, Chicken  19866894617389_2
gaactgctcacagctgtaatgattttgatcatcttcccaagatcaagcattaacagtttgatgacaggrttagataaagtctgaggaaaaatgctacaaattccatgctattcactgtttgttcattattattctcccttctaatgcaagtgttatgattgcaatttgtgcttataaaaaagtttttctaaaggtaagtattctaagtcaagtaaagggatagaaataagatttcaagatgagctgagagtatttgtgcagcagaagaatggtggccgttttggtggttcaactgtgcayttgtagctaaaccctatgcagattgttgctgtggttgccctttaacttttatttttagtaggatgctggggatgcaaaacaaatatgaaatgcttaggatggcaatttgcactgtgactagtctgccttctgtaaagttattaatcctcccaaatactttcacaagggaagtcttagacttgtatttttttactgcatggcacatcacaaactagcaacttgcttaaggctgctaatagttcccgaattctcctc

SEQ ID NO: 95414 - DNA, 600 bp, Chicken  19866894617393_1
taatgactttctctatatagcttgtaggtcagcaagcggagaaattttagctgttcgagctcttgctgcagatgaatgctctggtcagttcactggaggcagcgcatgtcccattatcctgcctgtgcctttagaaccattccatgtgcttcaccaaggcatgcgcactggactgacacagcagaaacactgatgttaccagggcttgcttgcaggttagaagaacctcagataaaacatggagtcatctctccatcagcagtcactcatctgagggagtgttcttgataacaaggtccrtgaccaactccctatattaattttatttgtatgtcaacttttcctaaggttttcagcgcttaatctagcaccagaaaagcactgaggtggagaccgaccctttgcagagagtaaagcctggctttgcttgacctacttcacagcactgcrtgcccttagttagtcccttttgcaggtgtttgccaagccatgcacccartcgtgggacattctttggcatgtcacatcgggagtgatttagttaccagccagcgtgacaggtctgtcagccacctgtttgctccagcagcaccaccagcc

SEQ ID NO: 95415 - DNA, 523 bp, Chicken  19866894617393_2
tcaccaaggcatgcgcactggactgacacagcagaaacactgatgttaccagggcttgcttgcaggttagaagaacctcagataaaacatggagtcatctctccatcagcagtcactcatctgagggagtgttcttgataacaaggtccrtgaccaactccctatattaattttatttgtatgtcaacttttcctaaggttttcagcgcttaatctagcaccagaaaagcactgaggtggagaccgaccctttgcagagagtaaagcctggctttgcttgacctacttcacagcactgcrtgcccttagttagtcccttttgcaggtgtttgccaagccatgcacccartcgtgggacattctttggcatgtcacatcgggagtgatttagttaccagccagcgtgacaggtctgtcagccacctgtttgctccagcagcaccaccagcctacagtgaagcagcccatgtgttaactctttcttatagctggaccacaaggatcttgtctctccactgtggtg

SEQ ID NO: 95416 - DNA, 474 bp, Chicken  19866894617393_3
cagggcttgcttgcaggttagaagaacctcagataaaacatggagtcatctctccatcagcagtcactcatctgagggagtgttcttgataacaaggtccrtgaccaactccctatattaattttatttgtatgtcaacttttcctaaggttttcagcgcttaatctagcaccagaaaagcactgaggtggagaccgaccctttgcagagagtaaagcctggctttgcttgacctacttcacagcactgcrtgcccttagttagtcccttttgcaggtgtttgccaagccatgcacccartcgtgggacattctttggcatgtcacatcgggagtgatttagttaccagccagcgtgacaggtctgtcagccacctgtttgctccagcagcaccaccagcctacagtgaagcagcccatgtgttaactctttcttatagctggaccacaaggatcttgtctctccactgtggtg

SEQ ID NO: 95417 - DNA, 600 bp, Chicken  19866894617409_1
aaggtctccatttagtttgttgtttttactcacataagcagcactgaagtgaaaagctgaggaagtagcagtgattgtcttaaatgagtattttcttagtgcctgttttcttaatgaatcgttattcttcttaattggatgaccacgtttattgggcagtgcaaggacacatgtacacacatctccaccagcccagcacctgcaagggctggggccaagcgcccccagggcaggcatccctgtcgggaaggagcacaagacagaggccatgcagtcctcttcctctgcctgtgtgctttkytgagaaattcaaaacagtagcaacacacacacacagccaccagaagggtctttcttgccaaatatttctgctcccgtcacctgccacttcaaagcaaatgcagctcttccactggtgctgcctcctactaaccacatacgcctggttttgagaccaccagggccaggagtgtcaaactggcctggccataactgtgtcagcgtgtgtgtttgtgtgtgcacagggctctccgtctgcacgcgtgcaagggcagcagggcacagagcggggcagagcagggacccacagmcagtggacag

SEQ ID NO: 95418 - DNA, 600 bp, Chicken  19866894617409_2
aggtctccatttagtttgttgtttttactcacataagcagcactgaagtgaaaagctgaggaagtagcagtgattgtcttaaatgagtattttcttagtgcctgttttcttaatgaatcgttattcttcttaattggatgaccacgtttattgggcagtgcaaggacacatgtacacacatctccaccagcccagcacctgcaagggctggggccaagcgcccccagggcaggcatccctgtcgggaaggagcacaagacagaggccatgcagtcctcttcctctgcctgtgtgctttkytgagaaattcaaaacagtagcaacacacacacacagccaccagaagggtctttcttgccaaatatttctgctcccgtcacctgccacttcaaagcaaatgcagctcttccactggtgctgcctcctactaaccacatacgcctggttttgagaccaccagggccaggagtgtcaaactggcctggccataactgtgtcagcgtgtgtgtttgtgtgtgcacagggctctccgtctgcacgcgtgcaagggcagcagggcacagagcggggcagagcagggacccacagmcagtggacagc

SEQ ID NO: 95419 - DNA, 512 bp, Chicken  19866894617409_3
gggccaagcgcccccagggcaggcatccctgtcgggaaggagcacaagacagaggccatgcagtcctcttcctctgcctgtgtgctttkytgagaaattcaaaacagtagcaacacacacacacagccaccagaagggtctttcttgccaaatatttctgctcccgtcacctgccacttcaaagcaaatgcagctcttccactggtgctgcctcctactaaccacatacgcctggttttgagaccaccagggccaggagtgtcaaactggcctggccataactgtgtcagcgtgtgtgtytgtgtgtgcacagggctctccgtctgcacgcgtgcaagggcagcagggcacagagcggggcagagcagggacccacagmcagtggacagcactgagagtccgtagggctgaagccttgtccatgtgacctgtggcttctacaaaaattagcaaattcccttcctgctgatgcctaattatttgcagtgctctacggagagctcttttgttga

SEQ ID NO: 95420 - DNA, 433 bp, Chicken  19866894617409_4
gtgtgctttkytgagaaattcaaaacagtagcaacacacacacacagccaccagaagggtctttcttgccaaatatttctgctcccgtcacctgccacttcaaagcaaatgcagctcttccactggtgctgcctcctactaaccacatacgcctggttttgagaccaccagggccaggagtgtcaaactggcctggccataactgtgtcagcgtgtgtgtttgtgtgtgcacagggctctccgtctgcacgcgtgcaagggcagcagggcacagagcggggcagagcagggacccacagmcagtggacagcactgagagtccgtagggctgaagccttgtccatgtgacctgtggcttctacaaaaattagcaaattcccttcctgctgatgcctaattatttgcagtgctctacggagagctcttttgttga

SEQ ID NO: 95421 - DNA, 599 bp, Chicken  19866894617415_1
  misc_feature (1)..(45): n is any nucleotide
nnnnnnnnnnnnnnnnnnnnnnnnnnnnnnnnnnnnnnnnnnnnncttttctcagccacctatggatcccgttcccagcttgagtgatctgccatctctgggtgagcatggggaagtgctgggtaggtaagcagcagggaaatggtaggaaagaaagtgggaagaaatggatcctggctagctgtcagtgttttccaatctctgctgcatctgaagttctgtgctgagtcctgagagcaattttgtgaagcactctttctccagacagtctttcagttggcacgagtgaagtaggcaacrttggtctgtattcaaaagttttaattctggagcgactcgttagtgaaatggcacaagtgtgcatctgatctgatgctgtttccttcagaatcatgaaggaggggtttctggctctgatcttggcaagttaccagcactgctgcttgaatgatttgattcctgaagcagacaggctgtggctatgaccaagtaaacgtggaaaatatcttccacatccaaaactaaaagcataagtatgctgggatctaatataaaagactctcgggctgatgaaacctcactttgttattaagctgctt

SEQ ID NO: 95422 - DNA, 503 bp, Chicken  19866894617416_1
cagcattcctggtcaacaggagaggtcccagaaaataagtggcttgacgatgtgactcccatctacaagaaggatcataagaaggatccaggaaactacaggcctgtcagcctgaccttggtgccaagtaaggttatggagcagatcacactgagggagatcacacagcatgtgtgggacaaccagcagatcaggcctagccagcaggggttcgtgaaaggcaggtcctgcttgaccaatctgatctctttctatgattgagtgaaccatgtgctggaggagggcaaggcttcagcaaarccttcaacactgtctctcataccgttttcctaaagaaactggcagcccatggcctggaaagatacactctttgctggataaagaataggctgaatggctgggtcttgagagtggtagtgaatgaagtcatatccaactggcaaccagtcataagtagtttccaccggggttggtactggggtctggtctgtgcaataccttta

SEQ ID NO: 95423 - DNA, 600 bp, Chicken  19866894617427_1
aagcttttaaaggtttgggatacacagtacagttggattaagtatattttggtatggattacttctcttatctgagcccttttgtcttcctttatgatgacgaaacttcagagacaatgtccatgctgggctccaccaaccatccatttgctcgggatcaacaggtggaactttatttatttatttttaaaccagtgtttctgggctgcatggctggctataatccagctgactctatggctctgttcttcacactcttcatgggccgtatctggcctacacctactccacagtgtaatyaaatgatgtgcccactgcctggacactgcagggcacagttttggaaccagaaagccacagcaccagaattatgaaacaaagaagaaaccagaacaaatttaacagcaccttaaaagacagagagtagtgtataaggcctargagacagaggagagctttccccacagtaaaggggcccygtgctggacccagggacactgagggaggcaactgtataggtgtctctgacctatgaggtaggacacatcaggaaaggtagtcaacaccccatttgattgattagatttctagttctagtgc

SEQ ID NO: 95424 - DNA, 600 bp, Chicken  19866894617427_2
atccatttgctcgggatcaacaggtggaactttatttatttatttttaaaccagtgtttctgggctgcatggctggctataatccagctgactctatggctctgttcttcacactcttcatgggccgtatctggcctacacctactccacagtgtaatyaaatgatgtgcccactgcctggacactgcagggcacagttttggaaccagaaagccacagcaccagaattatgaaacaaagaagaaaccagaacaaatttaacagcaccttaaaagacagagagtagtgtataaggcctargagacagaggagagctttccccacagtaaaggggcccygtgctggacccagggacactgagggaggcaactgtataggtgtctctgacctatgaggtaggacacatcaggaaaggtagtcaacaccccatttgattgattagatttctagttctagtgctctctgatccatgttcttcataacggagaatcactataattctcttcccttggggtctagtcagggaaatggaagctcaagacagacacaataattcattttcttttgtctcctgccactgctcttcttcttagtttcaac

SEQ ID NO: 95425 - DNA, 600 bp, Chicken  19866894617427_3
tttatttttaaaccagtgtttctgggctgcatggctggctataatccagctgactctatggctctgttcttcacactcttcatgggccgtatctggcctacacctactccacagtgtaatyaaatgatgtgcccactgcctggacactgcagggcacagttttggaaccagaaagccacagcaccagaattatgaaacaaagaagaaaccagaacaaatttaacagcaccttaaaagacagagagtagtgtataaggcctargagacagaggagagctttccccacagtaaaggggcccygtgctggacccagggacactgagggaggcaactgtataggtgtctctgacctatgaggtaggacacatcaggaaaggtagtcaacaccccatttgattgattagatttctagttctagtgctctctgatccatgttcttcataacggagaatcactataattctcttcccttggggtctagtcagggaaatggaagctcaagacagacacaataattcattttcttttgtctcctgccactgctcttcttcttagtttcaacaaggatgctggtataaagaactagttgctattaataat

SEQ ID NO: 95426 - DNA, 599 bp, Chicken  19866894617430_1
  misc_feature (1)..(125): n is any nucleotide
nnnnnnnnnnnnnnnnnnnnnnnnnnnnnnnnnnnnnnnnnnnnnnnnnnnnnnnnnnnnnnnnnnnnnnnnnnnnnnnnnnnnnnnnnnnnnnnnnnnnnnnnnnnnnnnnnnnnnnnnnnnnntgaatatgcagatattttattaccacattttgaacttgtggtataaattcagacaaaaatccaacctcattacttaatagcgtcaaagtgtgaattcttggatcatttgctgctgttcttggtaacctgaactgttgaaaacttcaagtgcagacacgtggtgtggatacgtgtrtgattccctaatggcataactcacactttgcacgcaggtttggtatttgacatgaagggatggggatttggtggaagttggggaacgtggggaccasctggtaaagctggaggggcatccagtacaagaagtcatggccttaagttgtaccatgagaggttcaggttgaatattaggtataatttcttctctgaaagagtggtcaggcactgacacaggctgcacagggacatggcggagtcaccatccctggagatgtccaagagctgaggatatgtggcactgagggatgtggtcag

SEQ ID NO: 95427 - DNA, 599 bp, Chicken  19866894617430_2
  misc_feature (1)..(28): n is any nucleotide
nnnnnnnnnnnnnnnnnnnnnnnnnnnntgaatatgcagatattttattaccacattttgaacttgtggtataaattcagacaaaaatccaacctcattacttaatagcgtcaaagtgtgaattcttggatcatttgctgctgttcttggtaacctgaactgttgaaaacttcaagtgcagacacgtggtgtggatacgtgtrtgattccctaatggcataactcacactttgcacgcaggtttggtatttgacatgaagggatggggatttggtggaagttggggaacgtggggaccasctggtaaagctggaggggcatccagtacaagaagtcatggccttaagttgtaccatgagaggttcaggttgaatattaggtataatttcttctctgaaagagtggtcaggcactgacacaggctgcacagggacatggcggagtcaccatccctggagatgtccaagagctgaggatatgtggcactgagggatgtggtcagtggggtggattggggttggatttggtgatctcagtggtcttttccagccttaaaaattctatgaatggcagctatggaagggtgaaatgggtgagtg

SEQ ID NO: 95428 - DNA, 600 bp, Chicken  19866894617431_1
ctgacacaccgctggtggcatccctttctatgctcaggatctgaatgagtgaaagaatgaactggggaaggtgtccttcagctgaattagtgggaaaggtactgccttcagtgcagcttcttaagaagaggatgttttctatatgtcagttcctggaccatatgtgggattgcaggctttttactgtacattgctccttcagaagcagcacaagacaaagcgaggagttgatgggaagtgggcttacagacaggtaactcagaagatgtcttccacctctactctgtgaggccacatctrgagttctgggctcctcaggtcatgaaagacagggaactactggagagagtcctgtggagggctgcaaagatggttaggggcctggagcatctctcataggaggaaaggctgagagacctggggttgttcagcctggagaagagatgactgaggggggaattttataaatgcttataaatatctaaaggacatgagtcaagtgggtgaggtcagattcttttaaatggtgcccagtgacaaaacgaggggcactgtgcacaagctggaacatgagaagttccatacaaacacgaggaagaa

SEQ ID NO: 95429 - DNA, 600 bp, Chicken  19866894617441_1
cctccagcacctccagcacctccaagcaccaccaagccaggcaccatcggggccagctcacgttcccaaggtgcctgagagcggcgtcccgcctaaccagcacaggataaaatggcgcagagtctgcacacgtttacatcgcattgacgatgaatggaacgagccccaagaatgctgcgggagcagccgtgctgcagccctgctgagcgttgagagcagcaccccgaactctgccagccagcaggcttcgcggtccacgaggcactcccgtgcagctggctccagccaccggcgcagacrgggacagcaggatcacacaagaagccgctctccgctgcagcgccacgccacaggttccccaagccagccccaaaggcaccgtgggagcaggcaggcaccagcccttagtgatgagagcggcacccacagacacacaggacaaggaacaccgaggtcctcgagagcttccgcagcggctgctggaagccggtccaggcagccagggcgggcccggactcgaagccgctcacctcgtcaacatcgggatgcggagacccgcagccagccccgaagacgccgcaggagccggtccaggcggcg

SEQ ID NO: 95430 - DNA, 599 bp, Chicken  19866894617448_1
  misc_feature (1)..(71): n is any nucleotide
nnnnnnnnnnnnnnnnnnnnnnnnnnnnnnnnnnnnnnnnnnnnnnnnnnnnnnnnnnnnnnnnnnnnnnntcagaatagctttcattttttctgctgccttggcaggtttcaacaggtgtgaatgggaagcctgatttagtggctggcaaccctgcccatggcagggaggttggagatctttaagatcctttccattctaagccattctatgattctattattctaatctttgcctcttggcctgttaccccactaaaatatcaagccctatttggcttgtatcctcacagatgtttcytgatcctgatggtaacctgccattcttccatgtcacaaactgtgctcccatcctccctcctctggctcactcatgtctcagtgctcccccttcgcccatctctctctgtaactgctactctcccacytcacctctttgcccaatatagctcttttctctttttatcctgtgccctggcccttcttcagcccttgtgtttgctcctgcttaccctggtgcttgcttaaaattctttccctcttagctgtgccatgaagctcttggcctgacctaccactgtcaacctctttcccctygct

SEQ ID NO: 95431 - DNA, 600 bp, Chicken  19866894617448_2
gaagcctgatttagtggctggcaaccctgcccatggcagggaggttggagatctttaagatcctttccattctaagccattctatgattctattattctaatctttgcctcttggcctgttaccccactaaaatatcaagccctatttggcttgtatcctcacagatgtttcytgatcctgatggtaacctgccattcttccatgtcacaaactgtgctcccatcctccctcctctggctcactcatgtctcagtgctcccccttcgcccatctctctctgtaactgctactctcccacytcacctctttgcccaatatagctcttttctctttttatcctgtgccctggcccttcttcagcccttgtgtttgctcctgcttaccctggtgcttgcttaaaattctttccctcttagctgtgccatgaagctcttggcctgacctaccactgtcaacctctttcccctygctagcattatcccttcctcttcttttccaaattcatcagtattctaggtgagttgctttgttttctcctctagccatgcagtaggggtatttttgagtgtattactaggggtatcccaggcaggtggtgg

SEQ ID NO: 95432 - DNA, 600 bp, Chicken  19866894617448_3
ttcytgatcctgatggtaacctgccattcttccatgtcacaaactgtgctcccatcctccctcctctggctcactcatgtctcagtgctcccccttcgcccatctctctctgtaactgctactctcccacytcacctctttgcccaatatagctcttttctctttttatcctgtgccctggcccttcttcagcccttgtgtttgctcctgcttaccctggtgcttgcttaaaattctttccctcttagctgtgccatgaagctcttggcctgacctaccactgtcaacctctttcccctygctagcattatcccttcctcttcttttccaaattcatcagtattctaggtgagttgctttgttttctcctctagccatgcagtaggggtatttttgagtgtattactaggggtatcccaggcaggtggtggagtccagtcccagtatagaatttcatgaacaactrgagaaatagtaggkaaagttttctctgctttgaaagcagagaagactcagtaaagatgggattttcaggtaatttacctgccaaagtataataaggccttggaactcctttttctaatttatttgttttatttt

SEQ ID NO: 95433 - DNA, 600 bp, Chicken  19866894617448_4
tatcctgtgccctggcccttcttcagcccttgtgtttgctcctgcttaccctggtgcttgcttaaaattctttccctcttagctgtgccatgaagctcttggcctgacctaccactgtcaacctctttcccctygctagcattatcccttcctcttcttttccaaattcatcagtattctaggtgagttgctttgttttctcctctagccatgcagtaggggtatttttgagtgtattactaggggtatcccaggcaggtggtggagtccagtcccagtatagaatttcatgaacaactrgagaaatagtaggkaaagttttctctgctttgaaagcagagaagactcagtaaagatgggattttcaggtaatttacctgccaaagtataataaggccttggaactcctttttctaatttatttgttttatttttagttagggaaatgctgaggtattttctggaaggcaatctccaacaccatgctgcttctcccctgcaaaacactgataaaaaaaagcagcatttcttccttaattctttgggggaagtgaaattagttttccccttccagaaaacttcatccttaggtaagcactg

SEQ ID NO: 95434 - DNA, 600 bp, Chicken  19866894617448_5
gcccttcttcagcccttgtgtttgctcctgcttaccctggtgcttgcttaaaattctttccctcttagctgtgccatgaagctcttggcctgacctaccactgtcaacctctttcccctygctagcattatcccttcctcttcttttccaaattcatcagtattctaggtgagttgctttgttttctcctctagccatgcagtaggggtatttttgagtgtattactaggggtatcccaggcaggtggtggagtccagtcccagtatagaatttcatgaacaactrgagaaatagtaggkaaagttttctctgctttgaaagcagagaagactcagtaaagatgggattttcaggtaatttacctgccaaagtataataaggccttggaactcctttttctaatttatttgttttatttttagttagggaaatgctgaggtattttctggaaggcaatctccaacaccatgctgcttctcccctgcaaaacactgataaaaaaaagcagcatttcttccttaattctttgggggaagtgaaattagttttccccttccagaaaacttcatccttaggtaagcactggacattttcagcac

SEQ ID NO: 95435 - DNA, 600 bp, Chicken  19866894617456_1
gacttttcctttttagtgctttgtattcaatttctttctttacagaatgagaaattgtaaaagcagacataataaattcactgctccagtctagtgcttggtgtgctgagaaaagcagatttcttttggagaggaatgaagtttctgagcaaaatgtaggagcaaaagagtgattgtttgtgatcagatagaagcagaattgcttattaatttcctgtgtcaccacagaacttcttgattctgctcagtagctaagaatggcagatggcaagtaccaaaaccgatcattttcagatccayaggatctgataacttccattctggcatgtaaaatagtttttccatccgttctgtcataccatatataatgattattagcgtatcttgaaacagcaaaaaaatgaattgtctgaaatggactaatattgtgtaggataattatgaaacagcttgaccgcaaactcaagcgtggttatggaaaaacatgctgtacagttacttggttttagttcatgtgctgatgctttttgttttctggaaaaagtgagttttttaaaaacaaacttcattctttgcttatattgcagaaaagggtttggt

SEQ ID NO: 95436 - DNA, 599 bp, Chicken  19866894617466_1
  misc_feature (1)..(67): n is any nucleotide
nnnnnnnnnnnnnnnnnnnnnnnnnnnnnnnnnnnnnnnnnnnnnnnnnnnnnnnnnnnnnnnnnnnctctttggtaatgggaatgggtagcaactgacatattttatcagctttcatatcagcatgagatgtcactaataacataccatataaatatgcaattaagacattagtgtaaaaatgactttctataaagaataaaatccaataaaagataagtatgcaattcagtgtcctgcctcgattacaggatttgtttgtgtctttgcttttaataagatgcattttgtgtgcaatarttgtrtcacactgtgtctgacttaatgcgtgaggcacttcagtatggcatgattgttttccttcttcaggcagacctccagctgtggaccagcacttggtcaaacttatttgttcttagcaggaagctaagaacattaaccctcccaattgagcattatgactttggggagttgtgggaaacagccaaaagcattatytcagcttcttcaaaagtgtacactttggtctgctaatcagtcacaacctctgctcttaaaaagggttagattaatgccaatgttaaagtcttcaaaaaaat

SEQ ID NO: 95437 - DNA, 599 bp, Chicken  19866894617466_2
  misc_feature (1)..(62): n is any nucleotide
nnnnnnnnnnnnnnnnnnnnnnnnnnnnnnnnnnnnnnnnnnnnnnnnnnnnnnnnnnnnnnctctttggtaatgggaatgggtagcaactgacatattttatcagctttcatatcagcatgagatgtcactaataacataccatataaatatgcaattaagacattagtgtaaaaatgactttctataaagaataaaatccaataaaagataagtatgcaattcagtgtcctgcctcgattacaggatttgtttgtgtctttgcttttaataagatgcattttgtgtgcaatarttgtrtcacactgtgtctgacttaatgcgtgaggcacttcagtatggcatgattgttttccttcttcaggcagacctccagctgtggaccagcacttggtcaaacttatttgttcttagcaggaagctaagaacattaaccctcccaattgagcattatgactttggggagttgtgggaaacagccaaaagcattatytcagcttcttcaaaagtgtacactttggtctgctaatcagtcacaacctctgctcttaaaaagggttagattaatgccaatgttaaagtcttcaaaaaaatgctgt

SEQ ID NO: 95438 - DNA, 600 bp, Chicken  19866894617466_3
ataaaatccaataaaagataagtatgcaattcagtgtcctgcctcgattacaggatttgtttgtgtctttgcttttaataagatgcattttgtgtgcaatarttgtrtcacactgtgtctgacttaatgcgtgaggcacttcagtatggcatgattgttttccttcttcaggcagacctccagctgtggaccagcacttggtcaaacttatttgttcttagcaggaagctaagaacattaaccctcccaattgagcattatgactttggggagttgtgggaaacagccaaaagcattatytcagcttcttcaaaagtgtacactttggtctgctaatcagtcacaacctctgctcttaaaaagggttagattaatgccaatgttaaagtcttcaaaaaaatgctgttgagtttacagcagttaggtagtctgytagactgcactactcctgtcaattacgtactgattctcccttatgacaatgactataacargaaggaaattgcagaacatgaaccttttcttctgacaaaagttattgcaagggatttgacaggatacaaaattaaactcattttcttaataatcttgaaattatca

SEQ ID NO: 95439 - DNA, 471 bp, Chicken  19866894617466_4
aggcacttcagtatggcatgattgttttccttcttcaggcagacctccagctgtggaccagcacttggtcaaacttatttgttcttagcaggaagctaagaacattaaccctcccaattgagcattatgactttggggagttgtgggaaacagccaaaagcattatytcagcttcttcaaaagtgtacactttggtctgctaatcagtcacaacctctgctcttaaaaagggttagattaatgccaatgttaaagtcttcaaaaaaatgctgttgagtttacagcagttaggtagtctgytagactgcactactcctgtcaattacgtactgattctcccttatgacaatgactataacargaaggaaattgcagaacatgaaccttttcttctgacaaaagttattgcaagggatttgacaggatacaaaattaaactcattttcttaataatcttgaaattatcatcta

SEQ ID NO: 95440 - DNA, 410 bp, Chicken  19866894617466_5
cacttggtcaaacttatttgttcttagcaggaagctaagaacattaaccctcccaattgagcattatgactttggggagttgtgggaaacagccaaaagcattatytcagcttcttcaaaagtgtacactttggtctgctaatcagtcacaacctctgctcttaaaaagggttagattaatgccaatgttaaagtcttcaaaaaaatgctgttgagtttacagcagttaggtagtctgytagactgcactactcctgtcaattacgtactgattctcccttatgacaatgactataacargaaggaaattgcagaacatgaaccttttcttctgacaaaagttattgcaagggatttgacaggatacaaaattaaactcattttcttaataatcttgaaattatcatcta

SEQ ID NO: 95441 - DNA, 364 bp, Chicken  19866894617467_1
tgtgctatggtgacggctgaaatatctccttttaggggggaagtgcgtagggcagcatcccaacacattctgtttgaagcctgcagtgtgcatttgaactgcctaagctgcagaaatcaccaccaggcttacttgaagctgctgataggtcaggatggagaagggttgtggagatgtttgtgtaaaagttgaggatatttatgtgctagaaaactgcagtggttttgtgcagaagttttcaaagcaagggacagaggtgagtgtggtatttgatgaaggttatttaacaaaaggcacacycatatccagaaacctgggactttttaaaccagggctcagctcctgcagggcaactctaaagtag

SEQ ID NO: 95442 - DNA, 600 bp, Chicken  19866894617471_1
gttttacttgtttcttaacagctttattcagcacatactcttgggaacacttgcttgcctctatagaaaatacagctcctttgcagagctgagggagagcaccatgtaagaatcctctacctcatcttcagccccagttattattggatgagttttcaacttcttatactttgtgccagttatttttttttttttaaagatacttaagtgcttgacacaaaaacacagtgcgactttcacagacacttattcagccaactaacaggtatccatgttcatttttaaagacccaaatacctrctctcattctccctgaatctycgtttagacttcatacagtctaagctcactgttatttgtagagctctctaagtgcagttatttgactgctgagcactttttcttttgagaagagagccagcaatggactgaagttagcaggaagaatacaagaaaaactatgcaaacagaaccacagtacaatcagaagatactggaaggaagaaataaaaagcaacacctattaggtgggatgagaggagtaaagaagtgacagacctggtcagttacgtctgaaaacaaaaacagaaggaaatgaca

SEQ ID NO: 95443 - DNA, 600 bp, Chicken  19866894617471_2
ctttattcagcacatactcttgggaacacttgcttgcctctatagaaaatacagctcctttgcagagctgagggagagcaccatgtaagaatcctctacctcatcttcagccccagttattattggatgagttttcaacttcttatactttgtgccagttatttttttttttttaaagatacttaagtgcttgacacaaaaacacagtgcgactttcacagacacttattcagccaactaacaggtatccatgttcatttttaaagacccaaatacctrctctcattctccctgaatctycgtttagacttcatacagtctaagctcactgttatttgtagagctctctaagtgcagttatttgactgctgagcactttttcttttgagaagagagccagcaatggactgaagttagcaggaagaatacaagaaaaactatgcaaacagaaccacagtacaatcagaagatactggaaggaagaaataaaaagcaacacctattaggtgggatgagaggagtaaagaagtgacagacctggtcagttacgtctgaaaacaaaaacagaaggaaatgacaaggaattgatgacaacacata

SEQ ID NO: 95444 - DNA, 599 bp, Chicken  19866894617479_1
  misc_feature (1)..(186): n is any nucleotide
nnnnnnnnnnnnnnnnnnnnnnnnnnnnnnnnnnnnnnnnnnnnnnnnnnnnnnnnnnnnnnnnnnnnnnnnnnnnnnnnnnnnnnnnnnnnnnnnnnnnnnnnnnnnnnnnnnnnnnnnnnnnnnnnnnnnnnnnnnnnnnnnnnnnnnnnnnnnnnnnnnnnnnnnnnnnnnnnnnnnnnnnnntatctctgcaatgagaaatagccattaccacagtgttatagttggggtgaaaacaggtgttttttttcctccattttacacttgagaaaaaaaaaagaaaaaacccaacccaayaatattacatctcatgcctcggagatttaacatgttgcctcaggattcatttgtttaaaaattattattttcaattacacttttagagctttgtacaaatccttttactagttatgcataygtttgcattaaagaccaggaaggaagctgggtttgaatttaacgcattaataccttcaggccactggttaatctagcaatcagccatgtggatgcctacagaaattaattgtaagggtaggaagctccattctcaaagctgaatgggaaattatccttcacagctgtttcataattca

SEQ ID NO: 95445 - DNA, 599 bp, Chicken  19866894617479_2
  misc_feature (1)..(65): n is any nucleotide
nnnnnnnnnnnnnnnnnnnnnnnnnnnnnnnnnnnnnnnnnnnnnnnnnnnnnnnnnnnnnnnnntatctctgcaatgagaaatagccattaccacagtgttatagttggggtgaaaacaggtgttttttttcctccattttacacttgagaaaaaaaaaagaaaaaacccaacccaayaatattacatctcatgcctcggagatttaacatgttgcctcaggattcatttgtttaaaaattattattttcaattacacttttagagctttgtacaaatccttttactagttatgcataygtttgcattaaagaccaggaaggaagctgggtttgaatttaacgcattaataccttcaggccactggttaatctagcaatcagccatgtggatgcctacagaaattaattgtaagggtaggaagctccattctcaaagctgaatgggaaattatccttcacagctgtttcataattcaggtttccaaagctggcaattcttacacagttattcaagcaaaggaaaatagtaaaggtcatggaactaaacatcagagatgacccatttattactgttaatgttaatatcaagccagtcaa

SEQ ID NO: 95446 - DNA, 600 bp, Chicken  19866894617486_1
aaaattgcattagactggtgtcatattaacagagaactgagcccatgtgcacattgtaaatatatgtacatatgcatacatagtttctagagcgtttgttctttcagtactttagaaaaaatagatttgttgctatgcataagtccctcaaggaattacattagagaataatttaaaatatttgcagaacctcccaagcagaacatgtttaaaatgttaagtgttcaaaatgatatagaaatatctccccatttttaaccccaactattataagcaatatgaaataaggagagggaaaaygatctcaataacagaatccacattgaaaagttaggcactttgaactttcccatcaccttaccagtgtttccccacaggcagtctaaaagacagctcagcaatgtctgaatggaactgcacacaatagctccttcacaagtcggtctttaattgattacggctgtgtttatagaagcagaagagaatttacacaaaatgacagattgcctttagtgttaaaatagtttggtaatgttaatggtaaaggaggtccctttttacctcctctttagctgcatgaggtcctgaagatgagctttt

SEQ ID NO: 95447 - DNA, 600 bp, Chicken  19866894617488_1
aaagagcagatgctcaggttttctgttcttcttgccaactacttctgcttcttggcagctattacttctacaaacttttctgtctcaactctgtacaagtaactcttctgcttaccttctagatatgagcagatggcaaagtaaggtcctattgctttgacaaaggaaaaacagatcggactagattctttaatacacgtatattggtggaagtgtttctacacttagatatttttacaacataaatatatccagaattcaaatgttaattgcaactaaaatgaagaagtcagcagaccwtggtggcagctggcaggtttccattccctctacaatatatatcacaccggcagcgcctttcatttctagccagagagatcaaaaagccagcacatgtcttatgcttggacactagttgtgtcatggaatggagattccaaaatagggtgtgactgaggaaaatagaaaagaaaacaaactatagaagactgtggagactctatgcctctgcactggtactcattccatactctgtctccctgtcttttttagagaagttacacccatccaccttcaaatcctccagcatgtgacatcctg

SEQ ID NO: 95448 - DNA, 600 bp, Chicken  19866894617492_1
gatttggattttggatggtgctatgtggggctaagagttggattcgctgatctttattggttccctccaactcaggatgttctatgattctgttgtaatttgcatgcctccaggcctcaagaacctttcttgatctgcatgatctttcaaagcatgaccttgcagtgacatcagccagcttcctcagcacttatggagcccctctcagggatctggaattgccaaaatacggtgtcacaagtcaaagattcttcctgggtcacttcaccctgcttttaccttctgtgcacttccttttcmtgccagacttcagacagggtcctcttgttcatccacacaggcctcccgccgccttcgcttgatctccttcttgacaggatgaatcactcaggagctcagaagaggtaatcgtggaatatcaaattgctcaggccctgatttggagtccgatatcttgtttgactgtgatcaaggcaagatgtttctgagtgttttataaattataccatacttgaaaggctggtgtatggccatctctgtagagttagaaggttgtgttcaaactgcagatttcacatcacacacaaaaaataaaaatag

SEQ ID NO: 95449 - DNA, 600 bp, Chicken  19866894617502_1
attttctcttcctgttttccctctaatcaactcccctctctccttaaaaatgtttccctccattctttctcatcccttccttgttttctgcctgcacttccagtccctggctccagtcagcccagagctgctttcagactcctacttgcagtgagtctgaaaacaatccatcttgaaaaacacaacctctgtgcaacattagccctttcatcttctctgctgattgctggaaaattggaagggtgttcaccgtgcttccagagagaattaaggatgatgtaaatagattagaaaagaatygctcctttatagacctagaaggatccagtcaggacagcaaagaaaagaaagggaatttcagtattgtaagaaggaaggtgctggatagacctggatcttggaagggtataggcatgaggatattcctccgagttgagtgagctgttaggagtggcttgtgygaaaacagctcattccagaaagttctgaataaaattctaggctgtatatgtagggcttaatttatttatttgtttgtttgttttggaaatagaagaaaaagagtgaaagcagattgacattgtatgcagatgtgtcgtg

SEQ ID NO: 95450 - DNA, 600 bp, Chicken  19866894617502_2
aacaatccatcttgaaaaacacaacctctgtgcaacattagccctttcatcttctctgctgattgctggaaaattggaagggtgttcaccgtgcttccagagagaattaaggatgatgtaaatagattagaaaagaatygctcctttatagacctagaaggatccagtcaggacagcaaagaaaagaaagggaatttcagtattgtaagaaggaaggtgctggatagacctggatcttggaagggtataggcatgaggatattcctccgagttgagtgagctgttaggagtggcttgtgygaaaacagctcattccagaaagttctgaataaaattctaggctgtatatgtagggcttaatttatttatttgtttgtttgttttggaaatagaagaaaaagagtgaaagcagattgacattgtatgcagatgtgtcgtggtctttccctttaggtttttggctgcttgttcaaattggaggagatctcttcctttcagtactgccacaaactattaaaatcaagcacattttcccagaaataagttctaggtgtttttaaaaaccccatcctttgaaaattctgtagttccagccaacat

SEQ ID NO: 95451 - DNA, 600 bp, Chicken  19866894617510_1
tgcctatgtaatatgtaattctgctttcccttctgaattaatgtattgtatatcattataaattctgtagctgtgcatcattatgatgcaccatgccctgaataatgcatgccttcaactttaattacttgtttaattatctttagtttgtttcaaagcctcaagcaacttctgttgcttagatgattagaaaattgcttccagtcgcagaaatctatttcctgttgtttcttctggcagtgattgcagaccggcctccccctgtcattcgacagggtcctgtgaatcagactgtagctrtagatggtactttagtactaaactgtgtggccacaggcactttaacacccactatcctctggaaaaaggatgggaccctgatctctacccaggactctcgcatcaaacagttggagacaggagcattacagatccgatatgccaaggtagcttgaactggcaaacctttttttgtgctgagttttgttgttgtctgtttattttttcttttcaggtcacttttcatgttggaaatactacattttaaattaatggaatgttaaataattgtatcaaaatacttgatatttcgtgttttta

SEQ ID NO: 95452 - DNA, 507 bp, Chicken  19866894617511_1
  misc_feature (1)..(226): n is any nucleotide
nnnnnnnnnnnnnnnnnnnnnnnnnnnnnnnnnnnnnnnnnnnnnnnnnnnnnnnnnnnnnnnnnnnnnnnnnnnnnnnnnnnnnnnnnnnnnnnnnnnnnnnnnnnnnnnnnnnnnnnnnnnnnnnnnnnnnnnnnnnnnnnnnnnnnnnnnnnnnnnnnnnnnnnnnnnnnnnnnnnnnnnnnnnnnnnnnnnnnnnnnnnnnnnnnnnnnnnnnnnnnnnnnncaacccacgggatgagaaatagcacaggtgcccctggagtggagggacggggtgggacaggtgaggcacggcgwgggctcagggatgaggatgggatggggatgggatgcaggctgtgctcaccccagccgatgcacaggtagagggtgaagtagctcctctcagagaaaacggccaccaccagcaggttatgcaggtaratgccctccaccagcagccagcagtagttggccacaatgccgtactgcatgaagactgtggccgcccggcagccagcggca

SEQ ID NO: 95453 - DNA, 381 bp, Chicken  19866894617511_2
  misc_feature (1)..(100): n is any nucleotide
nnnnnnnnnnnnnnnnnnnnnnnnnnnnnnnnnnnnnnnnnnnnnnnnnnnnnnnnnnnnnnnnnnnnnnnnnnnnnnnnnnnnnnnnnnnnnnnnnnnncaacccacgggatgagaaatagcacaggtgcccctggagtggagggacggggtgggacaggtgaggcacggcgwgggctcagggatgaggatgggatggggatgggatgcaggctgtgctcaccccagccgatgcacaggtagagggtgaagtagctcctctcagagaaaacggccaccaccagcaggttatgcaggtaratgccctccaccagcagccagcagtagttggccacaatgccgtactgcatgaagactgtggccgcccggcagccagcggca

SEQ ID NO: 95454 - DNA, 600 bp, Chicken  19866894617512_1
agatgcacaccctggtgacagatgcagacctgtggctaggcaccttaactgcagcccctttggggaacattcccaggtacaaagcaaaagaagttctaccctgggagcggctccacgcggccgcacgcttgttttgttgcaccctgttaaagaagtgacccacatacactgcttctgggagtctgctggagaaactgataacagaaccatcctcctggcacccgtcagataggatgcagcaacactgactggtaattttgccttaagaaaacagagctgtatcttgatttcaataatgcyaagatctctctcccagyattttatttcctgaagatgattgactcaactttctgatcaagaaaaatgtttgtaagctcgtcctgaacactgctattgraaagagcatctcaaaaggaagagaagtccacacattgtccccaaggcccgtagaaataaaggaataaaaaccacaacaatctaatgatgataacaaagtatcaccatcaaatcattcaagtttatctcttctgagcattaacatatctgaagcaacagcagcaacgtacgtgcaggcacgcttagtgatcctgctctactttt

SEQ ID NO: 95455 - DNA, 600 bp, Chicken  19866894617512_2
acagatgcagacctgtggctaggcaccttaactgcagcccctttggggaacattcccaggtacaaagcaaaagaagttctaccctgggagcggctccacgcggccgcacgcttgttttgttgcaccctgttaaagaagtgacccacatacactgcttctgggagtctgctggagaaactgataacagaaccatcctcctggcacccgtcagataggatgcagcaacactgactggtaattttgccttaagaaaacagagctgtatcttgatttcaataatgcyaagatctctctcccagyattttatttcctgaagatgattgactcaactttctgatcaagaaaaatgtttgtaagctcgtcctgaacactgctattgraaagagcatctcaaaaggaagagaagtccacacattgtccccaaggcccgtagaaataaaggaataaaaaccacaacaatctaatgatgataacaaagtatcaccatcaaatcattcaagtttatctcttctgagcattaacatatctgaagcaacagcagcaacgtacgtgcaggcacgcttagtgatcctgctctactttttccactgtggtgatggc

SEQ ID NO: 95456 - DNA, 600 bp, Chicken  19866894617512_3
accctgggagcggctccacgcggccgcacgcttgttttgttgcaccctgttaaagaagtgacccacatacactgcttctgggagtctgctggagaaactgataacagaaccatcctcctggcacccgtcagataggatgcagcaacactgactggtaattttgccttaagaaaacagagctgtatcttgatttcaataatgcyaagatctctctcccagyattttatttcctgaagatgattgactcaactttctgatcaagaaaaatgtttgtaagctcgtcctgaacactgctattgraaagagcatctcaaaaggaagagaagtccacacattgtccccaaggcccgtagaaataaaggaataaaaaccacaacaatctaatgatgataacaaagtatcaccatcaaatcattcaagtttatctcttctgagcattaacatatctgaagcaacagcagcaacgtacgtgcaggcacgcttagtgatcctgctctactttttccactgtggtgatggcaattcaaaacccatctcacagaaaaaaagttgatcagtcttccaggcatttgatttttttgggttcttacgcaggggcac

SEQ ID NO: 95457 - DNA, 600 bp, Chicken  19866894617524_1
ctgctctcaccagattccattgcaagtcgtcatttggtggagaagggagcacagtgacagacaggaaaagcatgagctgcaagtctaactatcttagaaaaccaagatagaaacgaatgtacaaatgatataaagttaaagtaatcaaaacattctccagttccctgtctgttttcttgagaaaaggaaagcagtgttatattttaagtagtacttgattttagatttttgactggccttacacagcagtttaaaatacaacacaaaatgcatcttgacttgcacttcattattataaaygagtgctaagcagaaaccatctgtatcttccactgttaatgtctgcatcatgctgcagttggccaacacttataatcacattctagacatgagatacaaattaagacttactaaatatctgtattttgtactatcattttgtactattgaagcaaaactatacaatgtgtgtcattgttctgaaggttcagagtcaaaacacttcagaaatgttgaaggtgttgcatatattttcatttgctcagtaagcttgctttcagttaatcttttaagtcttatgggccaaaaatatcttctgac

SEQ ID NO: 95458 - DNA, 600 bp, Chicken  19866894617525_1
cggtgggcagtgggttgaactgcttctcctgcaccttcttcagcttgactccatgccgcagctcccgcatcagctgcacccacagccgggcctgccgggggcgtggggtcagtgccggtccccccacagccccatccccctgcatggccgcaccgtgctgccatacccagtctgtgttgcgcaggctgcccagctctgctgccggcctctcctctgcctcctcatcctccttcagcttctgcagcatctgtgatggcacggggacactgttatcccactgcagtcatggcagcattttargatcccaaaaatctccccamacagggcagcttctcacctccttggcgtcgcggatcttggccaggaaagctttgagctccacagtttcrgcaaagagcgcccggcacacggcctggtaatgagcctgggcttcgttrggatctgcaaggcgtgcagcgcagcaccgcatggcctgcccraaggtgcgcacagctcgcagtggcccctcgccacyctcctcctcctcctcctgccccccatagccctcgtcggccgtgccgcagccgctgtcctctgagtcactgttggtcatcaggtcga

SEQ ID NO: 95459 - DNA, 600 bp, Chicken  19866894617525_2
tgcttctcctgcaccttcttcagcttgactccatgccgcagctcccgcatcagctgcacccacagccgggcctgccgggggcgtggggtcagtgccggtccccccacagccccatccccctgcatggccgcaccgtgctgccatacccagtctgtgttgcgcaggctgcccagctctgctgccggcctctcctctgcctcctcatcctccttcagcttctgcagcatctgtgatggcacggggacactgttatcccactgcagtcatggcagcattttargatcccaaaaatctccccamacagggcagcttctcacctccttggcgtcgcggatcttggccaggaaagctttgagctccacagtttcrgcaaagagcgcccggcacacggcctggtaatgagcctgggcttcgttrggatctgcaaggcgtgcagcgcagcaccgcatggcctgcccraaggtgcgcacagctcgcagtggcccctcgccacyctcctcctcctcctcctgccccccatagccctcgtcggccgtgccgcagccgctgtcctctgagtcactgttggtcatcaggtcgatgagctgctccagctgtggr

SEQ ID NO: 95460 - DNA, 600 bp, Chicken  19866894617525_3
gcctgccgggggcgtggggtcagtgccggtccccccacagccccatccccctgcatggccgcaccgtgctgccatacccagtctgtgttgcgcaggctgcccagctctgctgccggcctctcctctgcctcctcatcctccttcagcttctgcagcatctgtgatggcacggggacactgttatcccactgcagtcatggcagcattttargatcccaaaaatctccccamacagggcagcttctcacctccttggcgtcgcggatcttggccaggaaagctttgagctccacagtttcrgcaaagagcgcccggcacacggcctggtaatgagcctgggcttcgttrggatctgcaaggcgtgcagcgcagcaccgcatggcctgcccraaggtgcgcacagctcgcagtggcccctcgccacyctcctcctcctcctcctgccccccatagccctcgtcggccgtgccgcagccgctgtcctctgagtcactgttggtcatcaggtcgatgagctgctccagctgtggrctcagctcccgctcctcgttctcatccagcccccagtccagcgcccggtagatggcgaagcccaaggac

SEQ ID NO: 95461 - DNA, 600 bp, Chicken  19866894617525_4
ccctgcatggccgcaccgtgctgccatacccagtctgtgttgcgcaggctgcccagctctgctgccggcctctcctctgcctcctcatcctccttcagcttctgcagcatctgtgatggcacggggacactgttatcccactgcagtcatggcagcattttargatcccaaaaatctccccamacagggcagcttctcacctccttggcgtcgcggatcttggccaggaaagctttgagctccacagtttcrgcaaagagcgcccggcacacggcctggtaatgagcctgggcttcgttrggatctgcaaggcgtgcagcgcagcaccgcatggcctgcccraaggtgcgcacagctcgcagtggcccctcgccacyctcctcctcctcctcctgccccccatagccctcgtcggccgtgccgcagccgctgtcctctgagtcactgttggtcatcaggtcgatgagctgctccagctgtggrctcagctcccgctcctcgttctcatccagcccccagtccagcgcccggtagatggcgaagcccaaggactgaaccatctgcaaggagacagcaccgctgggccaccaaaagccctgg

SEQ ID NO: 95462 - DNA, 600 bp, Chicken  19866894617525_5
cgcaggctgcccagctctgctgccggcctctcctctgcctcctcatcctccttcagcttctgcagcatctgtgatggcacggggacactgttatcccactgcagtcatggcagcattttargatcccaaaaatctccccamacagggcagcttctcacctccttggcgtcgcggatcttggccaggaaagctttgagctccacagtttcrgcaaagagcgcccggcacacggcctggtaatgagcctgggcttcgttrggatctgcaaggcgtgcagcgcagcaccgcatggcctgcccraaggtgcgcacagctcgcagtggcccctcgccacyctcctcctcctcctcctgccccccatagccctcgtcggccgtgccgcagccgctgtcctctgagtcactgttggtcatcaggtcgatgagctgctccagctgtggrctcagctcccgctcctcgttctcatccagcccccagtccagcgcccggtagatggcgaagcccaaggactgaaccatctgcaaggagacagcaccgctgggccaccaaaagccctggcactgcccgtgccacatctrcatgcagagcccccatccatcg

SEQ ID NO: 95463 - DNA, 600 bp, Chicken  19866894617525_6
tgcctcctcatcctccttcagcttctgcagcatctgtgatggcacggggacactgttatcccactgcagtcatggcagcattttargatcccaaaaatctccccamacagggcagcttctcacctccttggcgtcgcggatcttggccaggaaagctttgagctccacagtttcrgcaaagagcgcccggcacacggcctggtaatgagcctgggcttcgttrggatctgcaaggcgtgcagcgcagcaccgcatggcctgcccraaggtgcgcacagctcgcagtggcccctcgccacyctcctcctcctcctcctgccccccatagccctcgtcggccgtgccgcagccgctgtcctctgagtcactgttggtcatcaggtcgatgagctgctccagctgtggrctcagctcccgctcctcgttctcatccagcccccagtccagcgcccggtagatggcgaagcccaaggactgaaccatctgcaaggagacagcaccgctgggccaccaaaagccctggcactgcccgtgccacatctrcatgcagagcccccatccatcgattctgggcctcaccacccagtgcataccacgacc

SEQ ID NO: 95464 - DNA, 600 bp, Chicken  19866894617525_7
acagggcagcttctcacctccttggcgtcgcggatcttggccaggaaagctttgagctccacagtttcrgcaaagagcgcccggcacacggcctggtaatgagcctgggcttcgttrggatctgcaaggcgtgcagcgcagcaccgcatggcctgcccraaggtgcgcacagctcgcagtggcccctcgccacyctcctcctcctcctcctgccccccatagccctcgtcggccgtgccgcagccgctgtcctctgagtcactgttggtcatcaggtcgatgagctgctccagctgtggrctcagctcccgctcctcgttctcatccagcccccagtccagcgcccggtagatggcgaagcccaaggactgaaccatctgcaaggagacagcaccgctgggccaccaaaagccctggcactgcccgtgccacatctrcatgcagagcccccatccatcgattctgggcctcaccacccagtgcataccacgaccctcagggcaaggggagcaggaggaaatgcacaagggaacacacggccatgcccgtggtgccatgacattgcctgcccagggacccctgtgacgtgcagccagcagg

SEQ ID NO: 95465 - DNA, 466 bp, Chicken  19866894617525_8
gcagcaccgcatggcctgcccraaggtgcgcacagctcgcagtggcccctcgccacyctcctcctcctcctcctgccccccatagccctcgtcggccgtgccgcagccgctgtcctctgagtcactgttggtcatcaggtcgatgagctgctccagctgtggrctcagctcccgctcctcgttctcatccagcccccagtccagcgcccggtagatggcgaagcccaaggactgaaccatctgcaaggagacagcaccgctgggccaccaaaagccctggcactgcccgtgccacatctrcatgcagagcccccatccatcgattctgggcctcaccacccagtgcataccacgaccctcagggcaaggggagcaggaggaaatgcacaagggaacacacggccatgcccgtggtgccatgacattgcctgcccagggacccctgtgacgtgcagccagcaggcat

SEQ ID NO: 95466 - DNA, 499 bp, Chicken  19866894617533_1
acttttgtttatcacataaaggagcctagtgaggatgccttctaccaggattctggcatgtaacaccatgaatgggaaggaaagtcactaaaaattgcaattacagaaaagatacacacaacacttacagaaaagaaatacatactcacttctctttggttaaagaacagatcttgaactgcatcagcagatactggtgcctgtgacttgtctggtaacatgtaaatgacaggaattaaggaatcagaaatacacagttgaaaagacagtatataaaacaaacatctttaacgccaaaawcatggcttggtcaaacacagttccttagctcataatactgatgtcagcagagaagagccaccacagttacctttwttaagctagatgatgctaaactaaatgatatgtaggatccaaaatgattatttaagctacagtccctcactgagttaatgcaactacacgtgcagtactgcactacaagcagatactttcaaga

SEQ ID NO: 95467 - DNA, 424 bp, Chicken  19866894617533_2
gaaggaaagtcactaaaaattgcaattacagaaaagatacacacaacacttacagaaaagaaatacatactcacttctctttggttaaagaacagatcttgaactgcatcagcagatactggtgcctgtgacttgtctggtaacatgtaaatgacaggaattaaggaatcagaaatacacagttgaaaagacagtatataaaacaaacatctttaacgccaaaawcatggcttggtcaaacacagttccttagctcataatactgatgtcagcagagaagagccaccacagttacctttwttaagctagatgatgctaaactaaatgatatgtaggatccaaaatgattatttaagctacagtccctcactgagttaatgcaactacacgtgcagtactgcactacaagcagatactttcaaga

SEQ ID NO: 95468 - DNA, 600 bp, Chicken  19866894617535_1
acattttaaaatacgaaaagaaaacgatttagaaataatgcttgcttgttttcagtgtaattgttgtggtggtgtgttggttttgttgttttgttgttgttgttgttgttttttaaccagaaaagctgagggcttctgatataattacatggtgcagttgaaaggatgactatcttaaaatcacactggcacacagtgtgccttagaagaactcttgctgtgaaaaaggtctccagaaacactggactaaatagcaggatgggaaatcattcaactcttgatttccacactgttcatttmtattaataagaatttttaagtaagagtaaatatagcacagcaaacctgcaagatayaatgtgcaacagtaagcatttacgtcctagccaagatgagttttttgtcttaatgtaatgttccagattttagtgaatgacttcgtttcccaaatcatacgtgcaaaacacctgttgactctaccagcattgactgcaagagttcttattaaaatcaattacaatgagaggatttgtaaccctcagagcattctttttatggtaaatccttacagaaacatccatcccgaggggaggctggact

SEQ ID NO: 95469 - DNA, 600 bp, Chicken  19866894617535_2
gtaattgttgtggtggtgtgttggttttgttgttttgttgttgttgttgttgttttttaaccagaaaagctgagggcttctgatataattacatggtgcagttgaaaggatgactatcttaaaatcacactggcacacagtgtgccttagaagaactcttgctgtgaaaaaggtctccagaaacactggactaaatagcaggatgggaaatcattcaactcttgatttccacactgttcatttmtattaataagaatttttaagtaagagtaaatatagcacagcaaacctgcaagatayaatgtgcaacagtaagcatttacgtcctagccaagatgagttttttgtcttaatgtaatgttccagattttagtgaatgacttcgtttcccaaatcatacgtgcaaaacacctgttgactctaccagcattgactgcaagagttcttattaaaatcaattacaatgagaggatttgtaaccctcagagcattctttttatggtaaatccttacagaaacatccatcccgaggggaggctggacttgcgtgcattacacttgcataattacacaaccttcattaacactgattgaaagact

SEQ ID NO: 95470 - DNA, 600 bp, Chicken  19866894617539_1
agaaggcttgtttgttgggatcccactgcctatgttagcagaagaggatgacgtggcagtggtagtcaaagttgagttagctgtagtagctgcagaagacatggcactgtttgacgttgcagtcatagtactactggtagaagctgcaggagcagacggagtgttgggatttccagtgctggctgtcagtgggggcagagcagaggctggctggctagagggagggaccagatttgtttgggcaagtaacgaattgtccaaaggctgagaagcaagataaggacctaaaaaacagaggaraaaaatccatacattttatattgcaactagttttgagtatacttaaactaagcctacagttttaacaaaacagtgactaaaccttaaacatgtattttatcttttaaaaaaatacaagcattcacatttcaacttgtaacagtctcataacactttcagaaacacacaaattatttcaaaagtaacttctgttttccagtcatttgaatttgagcaagaaatcactgcctcagaatgtaagacagcaacggaaaaaagacagcagcagtctctatcaagcaatagcactgccattcccta

SEQ ID NO: 95471 - DNA, 600 bp, Chicken  19866894617555_1
gggcttgaaaagttctctggtgtcgtagtagtgtttttactatgtccaggcgtagtccaagttcttctaaagttctgaggtcagctttgtgttgttgtaaccattgtgcttttaaggttttttttatcaacatgaatgccattattaaagggattccacaagtggaattccacaagcacttttccactagtgacattcttctgtatactccttacagaagagaaaagatgatcggcttattttaaaagagagtttgttgtgaggtgctgtggtaaacattgactttttaatgagagcctytttatctgataaacccgaggctaaattttgctgtatgttctccaattatagaagtcctggaaaaaaactacagtgatcctatagggggttaagctgtacccaagtctgagaaattcagcaagttcttaattgttttaggtagatatctgatgcactggaaccctgactcatgaagaggaggaggatatgctaatgcaaacactgtgcctatggttgcacagagcttataggatgtaatttgctgcagtctgacataacctggaaatcgccaagcctgtcttttttaattcctgtcccaca

SEQ ID NO: 95472 - DNA, 600 bp, Chicken  19866894617557_1
ttctctagatgagcatgccccgtgggaagagcttgctgctttaggcaaccttgcacgttcctgaccagcccaaggtgaaaccacaaaggaatcaatttacttattcaaagtgtttaacacaatcgattcctttttggcagccctgaatgtcatttaggcagaccagaagtctttttcaagtacagctaaccctgtgtgtagccaaactcctctagatttttccatcattttcttctttggtgaagcagaaaaatccctgcctgcctgctggattttgtacttggttttagggcctccctktatttcaactgttatcagaggaaattagtaagttctggggcactgatttggatcatatgcatttaaacttcccctggctctttctgctacatcaatactgtaaaatacatagtagtaagtacatgaaatctaaaaaaatgtgaaaattcattaagggcgaaagagaagtgaacacccatattttgttgaccctgattgatgagaagttcctgaagacaaaagtcttccattaacctacaaaagaaatgtcatgtaggaggcactgtaatcaaaatcttttacctatgaagaccagtgtct

SEQ ID NO: 95473 - DNA, 599 bp, Chicken  19866894617558_1
  misc_feature (1)..(71): n is any nucleotide
nnnnnnnnnnnnnnnnnnnnnnnnnnnnnnnnnnnnnnnnnnnnnnnnnnnnnnnnnnnnnnnnnnnnnnncagtgaatgagatatattggtacgtgctttatatttatctgcattttcaaagtaatgcttttttttctttttttttttcccaagaattaaattgcttcggttagttgtggagagaaatccctttcatattatttctgtcatcttatcctgatttttctgtcctgcagtatggcagcattcaaagagcactcatcttttctaagactttcatctgtcttccttacccttrtaattatactgctatggatctgcaaaaggtgtgctagagtagcgtaaaggtacctgacccaagtagtgtagactgaggcctctgtttttctttgtcaaacatgagaatgttgtcataaaaaaaaaatgaaattgaacaaaaaaatgtttccagggctgagatatgagcctgaattatgagctacaaaacaaggagggggaaatcatagaatcrttaatgctggaaaagayctgtaggatccccaaggccaaccccaacccatcccgctgtgcccaccagccatggccctcagtgctgag

SEQ ID NO: 95474 - DNA, 600 bp, Chicken  19866894617558_2
ttatcctgatttttctgtcctgcagtatggcagcattcaaagagcactcatcttttctaagactttcatctgtcttccttacccttrtaattatactgctatggatctgcaaaaggtgtgctagagtagcgtaaaggtacctgacccaagtagtgtagactgaggcctctgtttttctttgtcaaacatgagaatgttgtcataaaaaaaaaatgaaattgaacaaaaaaatgtttccagggctgagatatgagcctgaattatgagctacaaaacaaggagggggaaatcatagaatcrttaatgctggaaaagayctgtaggatccccaaggccaaccccaacccatcccgctgtgcccaccagccatggccctcagtgctgagtccagctgacytcttgatttcagtgccatcttctttcaggaagcattttgtgtagagtagttgcctttctgcaggtctacatgtgcagcttcctgggcttgttgctctcgttccctgaaagactgaatgagaacaccctgtctgctttccttatgtgatggatcattgatatactgttattttattagtctcaattctaaactatcccagtctt

SEQ ID NO: 95475 - DNA, 600 bp, Chicken  19866894617558_3
tcctgcagtatggcagcattcaaagagcactcatcttttctaagactttcatctgtcttccttacccttrtaattatactgctatggatctgcaaaaggtgtgctagagtagcgtaaaggtacctgacccaagtagtgtagactgaggcctctgtttttctttgtcaaacatgagaatgttgtcataaaaaaaaaatgaaattgaacaaaaaaatgtttccagggctgagatatgagcctgaattatgagctacaaaacaaggagggggaaatcatagaatcrttaatgctggaaaagayctgtaggatccccaaggccaaccccaacccatcccgctgtgcccaccagccatggccctcagtgctgagtccagctgacytcttgatttcagtgccatcttctttcaggaagcattttgtgtagagtagttgcctttctgcaggtctacatgtgcagcttcctgggcttgttgctctcgttccctgaaagactgaatgagaacaccctgtctgctttccttatgtgatggatcattgatatactgttattttattagtctcaattctaaactatcccagtcttttttgtttcacttaata

SEQ ID NO: 95476 - DNA, 600 bp, Chicken  19866894617558_4
gctatggatctgcaaaaggtgtgctagagtagcgtaaaggtacctgacccaagtagtgtagactgaggcctctgtttttctttgtcaaacatgagaatgttgtcataaaaaaaaaatgaaattgaacaaaaaaatgtttccagggctgagatatgagcctgaattatgagctacaaaacaaggagggggaaatcatagaatcrttaatgctggaaaagayctgtaggatccccaaggccaaccccaacccatcccgctgtgcccaccagccatggccctcagtgctgagtccagctgacytcttgatttcagtgccatcttctttcaggaagcattttgtgtagagtagttgcctttctgcaggtctacatgtgcagcttcctgggcttgttgctctcgttccctgaaagactgaatgagaacaccctgtctgctttccttatgtgatggatcattgatatactgttattttattagtctcaattctaaactatcccagtcttttttgtttcacttaataggaaaggcctctcttctctgaaaatatctttgtgtgtttatttcagtgctgtatttcttcctgagatgtgataaaataga

SEQ ID NO: 95477 - DNA, 600 bp, Chicken  19866894617560_1
atgtgcttacctactgctacgagccaactaggagccaggccttctctacatgatgctaagcagttctacccaattgagcggagcaattctctacatagaagaagcatttctgcccactaggcctgatcctagtataaatacttcttaggtatttgtatatctagcagcataagagtttgtcaaaattctgtttcattatgtttctctgttagaagaaaaagagaaaaatctttttgttgagattactcaacatttttcagctgctaatgagaaatacatcatgaaaaaggtatctgtacraaatcagaatagcaaatgcgaagtgaaaaaggaaaagaaacaggcttcccaccctgtattttacagtcaattccagttactaaaattaaaagctagactattggttttggcacttctcttttccttctcctcataactctttacattttggtgagaagaactattaagtgttttaagaataagctcgaggctaaagtcctcaacattcyatacagctgcagtgttcctggagctggctgcaggtgaccagacaagaacatccctgggcgtctcctacrgcacttctgtgtatgagaggac

SEQ ID NO: 95478 - DNA, 600 bp, Chicken  19866894617560_2
tagaagaaaaagagaaaaatctttttgttgagattactcaacatttttcagctgctaatgagaaatacatcatgaaaaaggtatctgtacraaatcagaatagcaaatgcgaagtgaaaaaggaaaagaaacaggcttcccaccctgtattttacagtcaattccagttactaaaattaaaagctagactattggttttggcacttctcttttccttctcctcataactctttacattttggtgagaagaactattaagtgttttaagaataagctcgaggctaaagtcctcaacattcyatacagctgcagtgttcctggagctggctgcaggtgaccagacaagaacatccctgggcgtctcctacrgcacttctgtgtatgagaggacactcctctgtggtgcaaaggtgccacgtagcatgcagtgaagcatagacctcttcattgtagatgtaaagcttttgaacagagcccattccatgatccatctgttgtttttgcaatgactgtaacagacaatgattcaggctgggggaaaaagaataaaaaccaacacacaaaacaaaataaaattttatacatgccacatattttaaa

SEQ ID NO: 95479 - DNA, 600 bp, Chicken  19866894617560_3
tcatgaaaaaggtatctgtacraaatcagaatagcaaatgcgaagtgaaaaaggaaaagaaacaggcttcccaccctgtattttacagtcaattccagttactaaaattaaaagctagactattggttttggcacttctcttttccttctcctcataactctttacattttggtgagaagaactattaagtgttttaagaataagctcgaggctaaagtcctcaacattcyatacagctgcagtgttcctggagctggctgcaggtgaccagacaagaacatccctgggcgtctcctacrgcacttctgtgtatgagaggacactcctctgtggtgcaaaggtgccacgtagcatgcagtgaagcatagacctcttcattgtagatgtaaagcttttgaacagagcccattccatgatccatctgttgtttttgcaatgactgtaacagacaatgattcaggctgggggaaaaagaataaaaaccaacacacaaaacaaaataaaattttatacatgccacatattttaaagggactgtatgaattgttcagacgtatggctcctgggatgaatcaggcttatagctcatatttgataat

SEQ ID NO: 95480 - DNA, 599 bp, Chicken  19866894617562_1
  misc_feature (1)..(57): n is any nucleotide
nnnnnnnnnnnnnnnnnnnnnnnnnnnnnnnnnnnnnnnnnnnnnnnnnnnnnnnnnggaggaatttccacgagctgtgaggttaggaccataaaactgactaactcaaggaaggaaagttacctggctgtatttcaaatacacccactggatcaggtgtactatatagcatcaattgcaaaagaatacttcattttcaaagctatccctatggtttcataagcttttgcctccaccagaaatacaagaagcaataaaagaagacatgcttctaaatgctataatagatccggagggagyccagatggggcagatgattacagcgctgaactccctgctatggaaatggacatttctgaatagaagtttcccttcaaaatttaacaatgaggttacaactcctgagactgcatagtgctgaccagtacgatttttctgccatggcttcttgaggaatttcaataaaactatcagaatggtatcagcacatttctttcagagaccctctgggcaccaggccccaagttattcgtgacctctgtgtgtcaggacagctcggtggttgagctcctcttcccaaggacctcttaagagcaaag

SEQ ID NO: 95481 - DNA, 600 bp, Chicken  19866894617567_1
caaatttgtttgcctagtgaaggaatttcctggatgcagataagcacactgaaaggtgtgagaaacactggaaaatggccaattgccatcactttacccaggcacagttaaattagcatacctacatcagcatgcagataagacagtgaacaaacatacaggggtaaacaaagtggaaggttcacatccagtgagttgagctcaggccataaaaacacaagcttgaaatcacttacactgaattctgatgattattttggccctttgctacagtattgcagcagccccaagaaacagtgsaattcagtcttttgaagaatgaagttagaaagacgtggtactaaagggcagtgcatataatttggtggttaattaagactcctactgaacggtttcattacatttctaagtaccactctcacggattggaaaattcatcagttttccaacactcctattgttacaaagaaaacgacaattaataaattgactaacccacactaattaaaagttgtcattgaaaaggttttacttacctcaaaccccaaccccccccaatcttctaacattcaaaacttttggaagttatgaaaattagat

SEQ ID NO: 95482 - DNA, 599 bp, Chicken  19866894617573_1
  misc_feature (1)..(165): n is any nucleotide
nnnnnnnnnnnnnnnnnnnnnnnnnnnnnnnnnnnnnnnnnnnnnnnnnnnnnnnnnnnnnnnnnnnnnnnnnnnnnnnnnnnnnnnnnnnnnnnnnnnnnnnnnnnnnnnnnnnnnnnnnnnnnnnnnnnnnnnnnnnnnnnnnnnnnnnnnnnnnnnnnnnnntcctgaagaaggagcatctgctgaacctgcgcagcttgctggtgggtgtcacggggcgccacggtgttgggggggtccccggtcctggtggtgaaagccactcctggtgttgaaacctgctgtcccatgcagcaytgggtgaccgggcggcagatgcacttcgagggcggtttccagggccgctgcaacaagctggtggatggctgctactccttctggcaggcggggctgctgcccctgctgcaccgtgcccttcacgcgcagggtgagtggggggaratcgggttcgtctgcctccaaggagygtctgtttgcggaaggggaaggggaatgaatgagcttgagcaaggaaacaaagcgtggcatagccctgcagggtgcagcgggagctttgggtagaaagaggcttcccygggctggtctcggggtgttta

SEQ ID NO: 95483 - DNA, 599 bp, Chicken  19866894617573_2
  misc_feature (1)..(21): n is any nucleotide
nnnnnnnnnnnnnnnnnnnnntcctgaagaaggagcatctgctgaacctgcgcagcttgctggtgggtgtcacggggcgccacggtgttgggggggtccccggtcctggtggtgaaagccactcctggtgttgaaacctgctgtcccatgcagcaytgggtgaccgggcggcagatgcacttcgagggcggtttccagggccgctgcaacaagctggtggatggctgctactccttctggcaggcggggctgctgcccctgctgcaccgtgcccttcacgcgcagggtgagtggggggaratcgggttcgtctgcctccaaggagygtctgtttgcggaaggggaaggggaatgaatgagcttgagcaaggaaacaaagcgtggcatagccctgcagggtgcagcgggagctttgggtagaaagaggcttcccygggctggtctcggggtgtttaacagaccctctttgccccccccccttgccctgtgcaggtgacacggcactcagcatgtcacactggatgttcgaccagtcggctctgcaggagtacatcctgctgtgctgccagtgcccagctggggggctgctggacaagcca

SEQ ID NO: 95484 - DNA, 600 bp, Chicken  19866894617573_3
aagaaggagcatctgctgaacctgcgcagcttgctggtgggtgtcacggggcgccacggtgttgggggggtccccggtcctggtggtgaaagccactcctggtgttgaaacctgctgtcccatgcagcaytgggtgaccgggcggcagatgcacttcgagggcggtttccagggccgctgcaacaagctggtggatggctgctactccttctggcaggcggggctgctgcccctgctgcaccgtgcccttcacgcgcagggtgagtggggggaratcgggttcgtctgcctccaaggagygtctgtttgcggaaggggaaggggaatgaatgagcttgagcaaggaaacaaagcgtggcatagccctgcagggtgcagcgggagctttgggtagaaagaggcttcccygggctggtctcggggtgtttaacagaccctctttgccccccccccttgccctgtgcaggtgacacggcactcagcatgtcacactggatgttcgaccagtcggctctgcaggagtacatcctgctgtgctgccagtgcccagctggggggctgctggacaagccaggaaagtgagtaccgaaatggttgttt

SEQ ID NO: 95485 - DNA, 600 bp, Chicken  19866894617573_4
aacctgctgtcccatgcagcaytgggtgaccgggcggcagatgcacttcgagggcggtttccagggccgctgcaacaagctggtggatggctgctactccttctggcaggcggggctgctgcccctgctgcaccgtgcccttcacgcgcagggtgagtggggggaratcgggttcgtctgcctccaaggagygtctgtttgcggaaggggaaggggaatgaatgagcttgagcaaggaaacaaagcgtggcatagccctgcagggtgcagcgggagctttgggtagaaagaggcttcccygggctggtctcggggtgtttaacagaccctctttgccccccccccttgccctgtgcaggtgacacggcactcagcatgtcacactggatgttcgaccagtcggctctgcaggagtacatcctgctgtgctgccagtgcccagctggggggctgctggacaagccaggaaagtgagtaccgaaatggttgtttgggggaggggggtaacgcacccccgggcctctctgctcagcgtgtcccccccatcctgccccaggtcacgggacttctaccacacctgctactgcctgagcgggttgg

SEQ ID NO: 95486 - DNA, 600 bp, Chicken  19866894617573_5
gcagatgcacttcgagggcggtttccagggccgctgcaacaagctggtggatggctgctactccttctggcaggcggggctgctgcccctgctgcaccgtgcccttcacgcgcagggtgagtggggggaratcgggttcgtctgcctccaaggagygtctgtttgcggaaggggaaggggaatgaatgagcttgagcaaggaaacaaagcgtggcatagccctgcagggtgcagcgggagctttgggtagaaagaggcttcccygggctggtctcggggtgtttaacagaccctctttgycccccccccttgccctgtgcaggtgacacggcactcagcatgtcacactggatgttcgaccagtcggctctgcaggagtacatcctgctgtgctgccagtgcccagctggggggctgctggacaagccaggaaagtgagtaccgaaatggttgtttgggggaggggggtaacgcacccccgggcctctctgctcagcgtgtcccccccatcctgccccaggtcacgggacttctaccacacctgctactgcctgagcgggttggccattgcccagcactttggcagtggagatctgcacc

SEQ ID NO: 95487 - DNA, 600 bp, Chicken  19866894617580_1
agttaaatggtacagttgtggcaatagataggagggacaccatccccagagggacctagatgcacttgaaaagtgggcacctgagaatctaatgagatttaacaaggctatgtgcaaagtgaacttgggttgagaaaatcccagatacaagtacaaactgggagaaaaattcactgaaagcagctctgtggagaaggacttgggagtcctgatggtcaaaaagctggacatgagccaggagtgctcttgcagaatggaaggccaacagtatcctgggctgcatcaaaagaggagtggcarcagggcaagggaggggattgtccccatctgctctgccctcttgaggccccatctagggtactgcatccagacctggggcccccagaacaaggaggatgcagagctgttggaatgggtccagaagacagccacagagatgttcagaaggttggagagccttttctgtgaagaaaggctgagggagctgtgcctgttcagcctgtagaagagaagacatcmgggagatctcattctggccttccagtacttgaagggagcttaaaaggaggaggaatactgactttttacatagtctgatag

SEQ ID NO: 95488 - DNA, 578 bp, Chicken  19866894617580_2
aaagctggacatgagccaggagtgctcttgcagaatggaaggccaacagtatcctgggctgcatcaaaagaggagtggcarcagggcaagggaggggattgtccccatctgctctgccctcttgaggccccatctagggtactgcatccagacctggggcccccagaacaaggaggatgcagagctgttggaatgggtccagaagacagccacagagatgttcagaaggttggagagccttttctgtgaagaaaggctgagggagctgtgcctgttcagcctgtagaagagaagacatcmgggagatctcattctggccttccagtacttgaagggagcttaaaaggaggaggaatactgactttttacatagtctgatagtgatagaaacaggaggaatggctttaaactaaaagaggtgagatgtaggtcagatgttaggaagaaattttttactcagtgtggtgaggtgctgacacatactgcccagagaagctgtgggtgctccatccctggtgctcaagaccaggttggatgaaaccctgggcagcctgatagtgattggcaaccctgctcat

SEQ ID NO: 95489 - DNA, 599 bp, Chicken  19866894617584_1
  misc_feature (1)..(235): n is any nucleotide
nnnnnnnnnnnnnnnnnnnnnnnnnnnnnnnnnnnnnnnnnnnnnnnnnnnnnnnnnnnnnnnnnnnnnnnnnnnnnnnnnnnnnnnnnnnnnnnnnnnnnnnnnnnnnnnnnnnnnnnnnnnnnnnnnnnnnnnnnnnnnnnnnnnnnnnnnnnnnnnnnnnnnnnnnnnnnnnnnnnnnnnnnnnnnnnnnnnnnnnnnnnnnnnnnnnnnnnnnnnnnnnnnnnnnnnnnnnttctaccctatgccaaagcactatcccaacacagagactgattgcagaatgcctgacaatagatwaaagaaataataagaaaaagatataaatctttcaatacacattatctcattatttatttaatctgaagcagtttttatttttgcatgtacattttagaccaacaaattaatgttggcagctttcctacctggtactttccaattttcccatgcacagattcccttgacatatttgtctctaccactgaggacatctactgagtaaataggagtaacttctccagatttgttggtagttttttgatgtgccccaagagagaataggatgagacaatcatgtttcaccctgtggctgaaat

SEQ ID NO: 95490 - DNA, 600 bp, Chicken  19866894617584_2
caagagagaataggatgagacaatcatgtttcaccctgtggctgaaataaaggctttgaacaaaggtgaaagactcatttgacttacttcatcaccaagcctatataaattaaatttctacattactcacagtagggcttacaattatgttgattaatcatatgttaccgagagaatggaaactcatttataacaggctttattaatctattgtgtcattcttgttttcttaaagccctgttgcagagacaattccattcccaatgagctggttaattttatttctcttccaccttattygtaattaatttttaaaatgctgtttacatgaaacacaattaatttaacgtagttctttaaagaaaagaattatgtaaactcttttcgaggtgtattattttaatagtaatattggaaatagagatgtttttcaaagtaatatgaatatgagtatgtaagttgacctttggtttgttatattgcagcaagaaatatgtacgtttaattttgaaatagtatattgacctttgaattttcttctagaggcaaatggaactaaccatggatggaatgatatgggaaactatttatttggctagg

SEQ ID NO: 95491 - DNA, 599 bp, Chicken  19866894617587_1
  misc_feature (1)..(29): n is any nucleotide
nnnnnnnnnnnnnnnnnnnnnnnnnnnnnctccaaccaaagaatctcccccttacatagatgcattttttggcaggctcccgaactcaccttggctgtggctggagctctgcgtgagcgcgttggtgatgttgggaagctcgttgccgtaattgccatcttcgaggggacacacgtccatctcgccccacttgcgcagctgccggagccaggaggatttctcttccagcttgcagtgagggttcagcacgacgcacacccacagcgcccctaaacaaagccgagaggtgagggatgtgcwgcgctccccagcactgcccggccgctgccttcccaccgcctgcaacgtttcctcggcatccataaactcactgcagcacaatgcacagacccaggagggggatttagacagctttcaaataaaagtaaaactcctctgtaatgaagctaaattataatctcatgagatgggggacagtggggaggagggaagaggagaccggctgtgtatgaatttgtgagtgcttctgtctgccaggacaaatctactgtttgaactacacatcaaagcatgcttaaaaacatcctggcaagctgcag

SEQ ID NO: 95492 - DNA, 599 bp, Chicken  19866894617597_1
  misc_feature (1)..(66): n is any nucleotide
nnnnnnnnnnnnnnnnnnnnnnnnnnnnnnnnnnnnnnnnnnnnnnnnnnnnnnnnnnnnnnnnnnataatagtagtaataataaaaatgataataatttgaactctcccctcaagaaattcctttagatagtagtgctaattgtaattctgtcatttctaccttcaaatccaaaatttaatgcccttttttattttaaaatggagagaatttagcagtgtctcaggaatcccagtttgtggaaatactatcaccctctgtaattgattgtagaaggcagagagcaacatgaggtatacrtttaaaacatgactttcttttccctccagtactgcagcctcacagcgttttctgaagtctcattcagcaatttgaggataagtcttaatagccagaataattcaagtacagattaaaatatggctataagaagagtagcaaaaaaataacaacagcaacaagaagctctgaaggcactgctttttccttaaytggtattctgatactagtggtgtgttgtgaaagtaatattataatttattttaagaaaataacactggaaaatattactgttttcagaagggaatgaggcatcgggg

SEQ ID NO: 95493 - DNA, 600 bp, Chicken  19866894617597_2
attttaaaatggagagaatttagcagtgtctcaggaatcccagtttgtggaaatactatcaccctctgtaattgattgtagaaggcagagagcaacatgaggtatacrtttaaaacatgactttcttttccctccagtactgcagcctcacagcgttttctgaagtctcattcagcaatttgaggataagtcttaatagccagaataattcaagtacagattaaaatatggctataagaagagtagcaaaaaaataacaacagcaacaagaagctctgaaggcactgctttttccttaaytggtattctgatactagtggtgtgttgtgaaagtaatattataatttattttaagaaaataacactggaaaatattactgttttcagaagggaatgaggcatcggggcctttagatcttaatgctgcgaaggcatcttgggtgccaaattcatgtgttgagatacacacacacacatatattttaaaccaaaattgttttctgtgaagttctacatgactggggtgcttttgtaaataggactctgtttagctttaggtatttgtgtgctgtgaaagaagtggggaaggattgtgcaagg

SEQ ID NO: 95494 - DNA, 599 bp, Chicken  19866894617601_1
  misc_feature (1)..(119): n is any nucleotide
nnnnnnnnnnnnnnnnnnnnnnnnnnnnnnnnnnnnnnnnnnnnnnnnnnnnnnnnnnnnnnnnnnnnnnnnnnnnnnnnnnnnnnnnnnnnnnnnnnnnnnnnnnnnnnnnnnnnnnncccagtaatgctaataatttttctgctgttgaatattgctgaaaagttatgtgcctagggatattagttacagctattgcaaaacattctgtttattctaagaagactaaaccaaataagaactgtataatgaaaggcttgaaaacacttgcttagataaattgagcaactgacgtcatcyacctggacttgtgcaaagcatttgacactgtcccccatgacttcctggtcaccaaactggagaaaaatggatttgatggatggaccacttgctggatgaggaactggctggatggtctccttcagagagttgcagtcaacagctcaacatccaagtggagactggtgacaagtggcgttcctcaaggatcagtgttgggactggtattatttaacatttttgtaggtgaaatggacagtggaatcaagtgcaccctcagcaagtttgcagactaygccaagctgagtggtgcagttgac

SEQ ID NO: 95495 - DNA, 600 bp, Chicken  19866894617601_2
ataaattgagcaactgacgtcatcyacctggacttgtgcaaagcatttgacactgtcccccatgacttcctggtcaccaaactggagaaaaatggatttgatggatggaccacttgctggatgaggaactggctggatggtctccttcagagagttgcagtcaacagctcaacatccaagtggagactggtgacaagtggcgttcctcaaggatcagtgttgggactggtattatttaacatttttgtaggtgaaatggacagtggaatcaagtgcaccctcagcaagtttgcagactaygccaagctgagtggtgcagttgacatgatagagggataggatgccatccagagggacctggacatgcttgagaggtgggcccataccaaccacrtggagtwcaacaaggccaagtgcaaggtcctgcatctgggttcgggcaatccaaagcacagataaaggttggrcagaaaatggcttgagagcagctcygaggagaaggatttaggggtgctgattgatgaaagattcaacatgagccagcaatgtgtgcttgcagcccagaagaccaaccatgtcttgggttgcatcaagagaagt

SEQ ID NO: 95496 - DNA, 551 bp, Chicken  19866894617601_3
gatttgatggatggaccacttgctggatgaggaactggctggatggtctccttcagagagttgcagtcaacagctcaacatccaagtggagactggtgacaagtggcgttcctcaaggatcagtgttgggactggtattatttaacatttttgtaggtgaaatggacagtggaatcaagtgcaccctcagcaagtttgcagactaygccaagctgagtggtgcagttgacatgatagagggataggatgccatccagagggacctggacatgcttgagaggtgggcccataccaaccacrtggagtwcaacaaggccaagtgcaaggtcctgcatctgggttcgggcaatccaaagcacagataaaggttggrcagaaaatggcttgagagcagctcygaggagaaggatttaggggtgctgattgatgaaagattcaacatgagccagcaatgtgtgcttgcagcccagaagaccaaccatgtcttgggttgcatcaagagaagtgtgaccagcaggtcgagggaggtgattctgcctctctactctgct

SEQ ID NO: 95497 - DNA, 544 bp, Chicken  19866894617601_4
tggatggaccacttgctggatgaggaactggctggatggtctccttcagagagttgcagtcaacagctcaacatccaagtggagactggtgacaagtggcgttcctcaaggatcagtgttgggactggtattatttaacatttttgtaggtgaaatggacagtggaatcaagtgcaccctcagcaagtttgcagactaygccaagctgagtggtgcagttgacatgatagagggataggatgccatccagagggacctggacatgcttgagaggtgggcccataccaaccacrtggagtwcaacaaggccaagtgcaaggtcctgcatctgggttcgggcaatccaaagcacagataaaggttggrcagaaaatggcttgagagcagctcygaggagaaggatttaggggtgctgattgatgaaagattcaacatgagccagcaatgtgtgcttgcagcccagaagaccaaccatgtcttgggttgcatcaagagaagtgtgaccagcaggtcgagggaggtgattctgcctctctactctgct

SEQ ID NO: 95498 - DNA, 478 bp, Chicken  19866894617601_5
ctcaacatccaagtggagactggtgacaagtggcgttcctcaaggatcagtgttgggactggtattatttaacatttttgtaggtgaaatggacagtggaatcaagtgcaccctcagcaagtttgcagactaygccaagctgagtggtgcagttgacatgatagagggataggatgccatccagagggacctggacatgcttgagaggtgggcccataccaaccacrtggagtwcaacaaggccaagtgcaaggtcctgcatctgggttcgggcaatccaaagcacagataaaggttggrcagaaaatggcttgagagcagctcygaggagaaggatttaggggtgctgattgatgaaagattcaacatgagccagcaatgtgtgcttgcagcccagaagaccaaccatgtcttgggttgcatcaagagaagtgtgaccagcaggtcgagggaggtgattctgcctctctactctgct

SEQ ID NO: 95499 - DNA, 453 bp, Chicken  19866894617601_6
acaagtggcgttcctcaaggatcagtgttgggactggtattatttaacatttttgtaggtgaaatggacagtggaatcaagtgcaccctcagcaagtttgcagactaygccaagctgagtggtgcagttgacatgatagagggataggatgccatccagagggacctggacatgcttgagaggtgggcccataccaaccacrtggagtwcaacaaggccaagtgcaaggtcctgcatctgggttcgggcaatccaaagcacagataaaggttggrcagaaaatggcttgagagcagctcygaggagaaggatttaggggtgctgattgatgaaagattcaacatgagccagcaatgtgtgcttgcagcccagaagaccaaccatgtcttgggttgcatcaagagaagtgtgaccagcaggtcgagggaggtgattctgcctctctactctgct

SEQ ID NO: 95500 - DNA, 599 bp, Chicken  19866894617604_1
  misc_feature (1)..(159): n is any nucleotide
nnnnnnnnnnnnnnnnnnnnnnnnnnnnnnnnnnnnnnnnnnnnnnnnnnnnnnnnnnnnnnnnnnnnnnnnnnnnnnnnnnnnnnnnnnnnnnnnnnnnnnnnnnnnnnnnnnnnnnnnnnnnnnnnnnnnnnnnnnnnnnnnnnnnnnnnnnnnnnngatgatgtgtctgagccccccaccccagccctgcctgagccccccaggagccccggcaccgccatggacacagagccccctggctccccgccaccccctctgggctcccctgcctgcaccccagcccccgccgagcccccygaggatgaggagatggagacgggtggtggtgagggcgactcatcgagaagccctcctggagatggcccccatgccagcccacccccagagctggggcccttccagggcctgcctgaggaagaagaggaggaggaagaagaagcaccgaggctggagcgggagggcaccagtgggagctccccgccgctgagtgaggaggacgggctggaggaagggcgggcaggggggaaccctgaatccaagggatcccctctgctcctggagccggaagagctgggccttgagacccccatggaagt

SEQ ID NO: 95501 - DNA, 600 bp, Chicken  19866894617609_1
acctgttcagagtaggacagacactaccagcactgctagtgtccttctgaagcttataagtcatctatctgaatatttgtcaatccagtttccttactgatgtcatatccctgcatctacaatgcattaatttcccttagcagtaatacctttaactgtcctccccagaacaggaaggtcatctgagtactttctgttttatttgattctgggacattgtaaatgataagtaaattccagtctgggcaggtggttttgaagaaaacatattgtctcctttgtcagcgaaattaaattgtsttcaacttctgtattcatttgctgtatttcagcagttcagtggtgataatagtttgtgatctcaccactgtgagacagcatgtgataagcatcgttagtcacagtggcaaattctggcctggaatcaaaccagcatggaaataggaaatcgttttttttctttattctctctgactaaaggaagaaaaatccaaagacagattttaaaaagaaatgtctggttgctgtagtatagggagaaagagttgctcattcgctcaaatacctttttataagtacataatttaagatatttttaaa

SEQ ID NO: 95502 - DNA, 600 bp, Chicken  19866894617612_1
caaaatactccgcgggcttttttagacataggaaatgctttagatctaatctgtctgggcttcagcaacacttttgatagaagagccacatgggaaattactgtttgtgttggaagaagcagagagtggtattggaatggaaggtcctttgggaaatagccatgagcaagcacagcaggttcttctggaagcaaaacggtaggggtggggggatgtacctgttgaaattcctcagagccagttttgttcatttcctcatggaacaggagatgttggaaggagaagcaaacgtgtgccacragagggaattgaacgaatctggccattttagtctggtaaagcaatggatgagaggcaattcattcgaggcgttaatgcatcaaggagatagataaacaccaaagagaaaacttatgtaagctaaaggcaagcattggcagcagaacaaatgtgcatcgagtggccccaaatagctgtaggcaggaaattaaaaggagttttctattcactggaggagagggcttcagctgcagcctctcaggaggagcacagagcagaggtgggagctgctctcagagctgtgggctgcacacatgggaa

SEQ ID NO: 95503 - DNA, 600 bp, Chicken  19866894617622_1
tgcgggcctgcagacagcaggctatattctcctaatcaacagctgacgtctcccctctgtctttttgctttggatcaatttgttcgctggttttatctgcacggttaattatcttatgagctctcacgataattgaggtctttgccctggctgtatttctcagcgctgcaaaagataagagcacagctgcatgggctgtgctgcagacaaagcccatcccctcccctatccattgcattgcccccacagtgccatcagcaccctgtgggtctcgtggcggcgccacggagtgcacgcagygcttcacagagccgcccagcactctgcacagatcacacaattacaagcatttgtctcccaaactttattaagaagtttcttaaaatctgtctgcagcgccccatcattagctgtaattaatggctgtgctgcggacaggggtaacctcgcggatcaaagctgcagtaattcatttcttctgttgcaaacagcagcaatgcccagagctccctcgagtcgctccatctttattaaataggcagagcctcggctgctcggatctgataaatcaagggccaagatgtgggctgaggtgcaagt

SEQ ID NO: 95504 - DNA, 600 bp, Chicken  19866894617629_1
tttcaaagactccctgagcctcccacaaagcccagtgtctcatttaagctcaagtctgagcaaccatccctcctctgtaccattctagtagtgcctatgctcagcccagcctctggccacagctcctggattgacctttgccctgcagtccaggtatcttgtctcctggatgagcccctcagatcaatataggagcttttcttggatggattttgcacccatattgtagttttgtctccagtccagccattggcagtacctcattttgctcctacacacctgaaaggtctgaggtcctasctcatggcttgccttgtttgggatgtcaaacagctctagttatcagcctttggctttccatactgtgcttagaccctgtagggccatctctcgtcactgcaggtgatgtgttgtggtcattctcrgctcctggcttacgttcccatgggtgaaatctattatctcccttctctaaaaatgttaagatctatatccacaataacatgctttgtgaaaatctacacctgaagtaaagtaaagtgagaattttaaggtaatccattagttgttttctgtttggattgaaagatatttctataa

SEQ ID NO: 95505 - DNA, 580 bp, Chicken  19866894617629_2
ctggattgacctttgccctgcagtccaggtatcttgtctcctggatgagcccctcagatcaatataggagcttttcttggatggattttgcacccatattgtagttttgtctccagtccagccattggcagtacctcattttgctcctacacacctgaaaggtctgaggtcctasctcatggcttgccttgtttgggatgtcaaacagctctagttatcagcctttggctttccatactgtgcttagaccctgtagggccatctctcgtcactgcaggtgatgtgttgtggtcattctcrgctcctggcttacgttcccatgggtgaaatctattatctcccttctctaaaaatgttaagatctatatccacaataacatgctttgtgaaaatctacacctgaagtaaagtaaagtgagaattttaaggtaatccattagttgttttctgtttggattgaaagatatttctataaaagacgtaagatatgaaggctaattttattttcttcccttttctttggtgctatagggaacttcatatacttaaatgctgttatgacagtgaggaaatcactctg

SEQ ID NO: 95506 - DNA, 599 bp, Chicken  19866894617632_1
  misc_feature (1)..(237): n is any nucleotide
nnnnnnnnnnnnnnnnnnnnnnnnnnnnnnnnnnnnnnnnnnnnnnnnnnnnnnnnnnnnnnnnnnnnnnnnnnnnnnnnnnnnnnnnnnnnnnnnnnnnnnnnnnnnnnnnnnnnnnnnnnnnnnnnnnnnnnnnnnnnnnnnnnnnnnnnnnnnnnnnnnnnnnnnnnnnnnnnnnnnnnnnnnnnnnnnnnnnnnnnnnnnnnnnnnnnnnnnnnnnnnnnnnnnnnnnnnnnntctttcagaacaacagcgtgaaacactctgttccagatgcttccattctctcattgtaaaaasctctggtacagtaagttacagaaaaaatggatgcactctcagatcatgtgcgtataaatgcgtaggagctcgtcatgaggtgatacttttggcacacaaactgtgatatacagtcattgctttgaaatgttagagaatacgttagaaggaaaaagtataaatatccattgtcttggggtgccagaaggcatgaaaaatcaccacccaataaatcttgttgggttaaaaaatgtgttcatggcatctctcagactgaatacaggattacttgatttatgggagttaagaagttacaaggt

SEQ ID NO: 95507 - DNA, 600 bp, Chicken  19866894617632_2
aggtggaaggataaatagtgattatatttgattttcaatactgagacaggaaggaagaaaaagagttccatcaagcttccatcattctttgagatcctgcgccgaaaatctctttctaatagatacaatggcatcaaggcagtaccactcctttactgaaaaagggtaatagccaaaaattacctgcttagtggagatgtggattttcatgcacataaattaaaagatttttcttctgcaagattgtgatgtttagatcctgatgtaagtggaagaaaattctccaaaaccaaaatcaayggagcaagggaaggatttgtgctttgatttcaaatgtgtgtaattgtgattgacaaagtactctttgagatttgggctaataataggtcaaatcctgctggaattgaaaatagttttggtacctaattaatgggatagcggtgatcagtgcaaggaacttgattatcaaaactattgtgcaaaagagcattcagttttcctatttccctaatttctttaagatgccattaatataaagttattttagcagacatgctcttgatatcgttgctgctctcttagtgcagggagtgcagcaga

SEQ ID NO: 95508 - DNA, 600 bp, Chicken  19866894617639_1
aattacagtgaagcagatctgactctggtgctttgactttaattcacttttgcatgcttgctagaaccctggaggatgcaaaaaagcatttgtgactcttcaggccaaaggaataacttaatcgaccaaaaattaaccaaaactgcagacataaagattgaagaactgtcagttaggaaaaatatcctatttatttttcagccagattttcccatttttctccttctttctgtgttgaccactacttcaactagcctctggccacaagctccagaaggaaaaagaacctctgtcatgtgycgctgctcagcctggtgcaccacactgtcctgttaaagagaggctgagctgaggactgagaagaccatgcccttccaaatgaaagcaacagcagtgagcagcaaggtgctctccaaggtgaattgaagatgccttgcccagtgtggcacttttaaaaacctggtrtaaccaatttttcaaaaccagatgcaggaaacgaaaacttcagtgtaagaaggcaccagatttcacaaccatcaaagagagttaatttcctctctgtcagctattactgcccaaggatagaatgatatttttcta

SEQ ID NO: 95509 - DNA, 600 bp, Chicken  19866894617639_2
ctgtcagttaggaaaaatatcctatttatttttcagccagattttcccatttttctccttctttctgtgttgaccactacttcaactagcctctggccacaagctccagaaggaaaaagaacctctgtcatgtgycgctgctcagcctggtgcaccacactgtcctgttaaagagaggctgagctgaggactgagaagaccatgcccttccaaatgaaagcaacagcagtgagcagcaaggtgctctccaaggtgaattgaagatgccttgcccagtgtggcacttttaaaaacctggtrtaaccaatttttcaaaaccagatgcaggaaacgaaaacttcagtgtaagaaggcaccagatttcacaaccatcaaagagagttaatttcctctctgtcagctattactgcccaaggatagaatgatatttttctacccgttagcagcaaacacaagaaaatatctgcactgcctcctgcagcttcagagggctggagcacctcccctgtgaagacaggctgagggagctgggcttgttcagcctgaaagaaagaaggctgcagggtgacctcactgcagcctttcaatatctaaaaggag

SEQ ID NO: 95510 - DNA, 600 bp, Chicken  19866894617646_1
aaaaatcaaactatatgtctgagagcattttcaaaatacttcttgaactctaggaggcttagtgccatgatcacttccctgggaggcctgtttaaatgccataccacttgttcagggaagaacattttcctaatctgaacaatattgtccattgtaaatgccgaaactgtatcattgtatgttgctatacctcttcccccactctcttggagatgcatttttccttgctggtagaggaatacttgggctagcatttgttctcgtgcactgtgcatggtggtgtcccctatgaacctaagrtagtgatgagctccatgtttccctcaaaacaaatcctagcaggggaaagctccctgtttgcatggcatactcaataggcatttcccacccttatagccatacagtccctcatatgtgtaaggtgtatataatggtgctgggtcagaacagtagaagcacattatcctcactgcaatattgtttctagagtgaattgaccacataggatgctatgtacattccacaccacactttagtggcaatgtcccctaaggtaagagtccataaatgtttatattatcaaatagtgggaagatcaaa

SEQ ID NO: 95511 - DNA, 600 bp, Chicken  19866894617652_1
tgggttggtgaaagcagaccctgtaagattatgagagaaaggcagttattttccaagcgttgtggcttggagtgctaggattaaatgatctccatttcagtttggaaacctaaagcatttgactggttaataaggaaagaaaagaaaatatgtttgttgcagaggaagaaggaagctaatagatctagggctggataataagatctaatgcagtcacctgtgtgatctcaattcagattcatcccaaaccaggatgactggaatctattgctttggtgattcagtgaccacgagctcacrttacatggctacagtttcaataagagcagggttcaaattgctggggctttgtgcttcccttctcacagagagatgattccctgaaggtgaractgaagtctaaaggctagaaaacttttagtattgtaacatcattcatatgcacatggtgataagcagagcctgcagcatctatttatacaccatcccacatatatacctgtcattatttacacctcatacagaaatgtagtgctctaacaacttttgacttgtatattgtgaaagtagctactgctgaaggatgcaaatacatttgac

SEQ ID NO: 95512 - DNA, 600 bp, Chicken  19866894617652_2
ccatttcagtttggaaacctaaagcatttgactggttaataaggaaagaaaagaaaatatgtttgttgcagaggaagaaggaagctaatagatctagggctggataataagatctaatgcagtcacctgtgtgatctcaattcagattcatcccaaaccaggatgactggaatctattgctttggtgattcagtgaccacgagctcacrttacatggctacagtttcaataagagcagggttcaaattgctggggctttgtgcttcccttctcacagagagatgattccctgaaggtgaractgaagtctaaaggctagaaaacttttagtattgtaacatcattcatatgcacatggtgataagcagagcctgcagcatctatttatacaccatcccacatatatacctgtcattatttacacctcatacagaaatgtagtgctctaacaacttttgacttgtatattgtgaaagtagctactgctgaaggatgcaaatacatttgacatgcagagacagaaaactggaaattaatatattgtactgtcggaacaaccaaggatgaggatgagacagtggtttgatttaatagtagtac

SEQ ID NO: 95513 - DNA, 599 bp, Chicken  19866894617654_1
  misc_feature (1)..(191): n is any nucleotide
nnnnnnnnnnnnnnnnnnnnnnnnnnnnnnnnnnnnnnnnnnnnnnnnnnnnnnnnnnnnnnnnnnnnnnnnnnnnnnnnnnnnnnnnnnnnnnnnnnnnnnnnnnnnnnnnnnnnnnnnnnnnnnnnnnnnnnnnnnnnnnnnnnnnnnnnnnnnnnnnnnnnnnnnnnnnnnnnnnnnnnnnnnnnnnntgagggagggagcggggcggtgctttccagctcctttcaaactcacccgccagcgcgtctgcccgcccagttgtcatggcggcctcggcaccgaagtttgctcggggtytgtgctggcgtcgtatctgcgagataaggtgagcccgcgccgcctccccttgctgtgcctcgcagaggggcggtttcgacgcgttcccgctccacagccgcctctgcctcacgaggctgccctgagcgcgctcgcgagctctggaggcctttggcggggccgggggcggtcgcgagagcgctcgtagygcgtcccgctgcagcccctccgcgggccgtgccgcccgggttgtgctgcggccgtctyctggaggcagatgttggtatctggtccttgtggagtggcctcaggccttaaag

SEQ ID NO: 95514 - DNA, 599 bp, Chicken  19866894617654_2
  misc_feature (1)..(3): n is any nucleotide
nnntgagggagggagcggggcggtgctttccagctcctttcaaactcacccgccagcgcgtctgcccgcccagttgtcatggcggcctcggcaccgaagtttgctcggggtytgtgctggcgtcgtatctgcgagataaggtgagcccgcgccgcctccccttgctgtgcctcgcagaggggcggtttcgacgcgttcccgctccacagccgcctctgcctcacgaggctgccctgagcgcgctcgcgagctctggaggcctttggcggggccgggggcggtcgcgagagcgctcgtagygcgtcccgctgcagcccctccgcgggccgtgccgcccgggttgtgctgcggccgtctyctggaggcagatgttggtatctggtccttgtggagtggcctcaggccttaaaggcggtgaggcttcaaaacctagctgcaggtgtaacttgcatgctgaatcgcgccactgccttgagaataacgcagcacagagatctgggctcaactttctcgacctgcgtctgcataagaactgtctgagttgacatggttggggtgggttggcagttggactgggtgagattagtgctcttttccaa

SEQ ID NO: 95515 - DNA, 600 bp, Chicken  19866894617654_3
cgtctgcccgcccagttgtcatggcggcctcggcaccgaagtttgctcggggtytgtgctggcgtcgtatctgcgagataaggtgagcccgcgccgcctccccttgctgtgcctcgcagaggggcggtttcgacgcgttcccgctccacagccgcctctgcctcacgaggctgccctgagcgcgctcgcgagctctggaggcctttggcggggccgggggcggtcgcgagagcgctcgtagygcgtcccgctgcagcccctccgcgggccgtgccgcccgggttgtgctgcggccgtctyctggaggcagatgttggtatctggtccttgtggagtggcctcaggccttaaaggcggtgaggcttcaaaacctagctgcaggtgtaacttgcatgctgaatcgcgccactgccttgagaataacgcagcacagagatctgggctcaactttctcgacctgcgtctgcataagaactgtctgagttgacatggttggggtgggttggcagttggactgggtgagattagtgctcttttccaacctcaacagttctgtgattctatggtatcgggtgtgactcgggactctgagagcagtgt

SEQ ID NO: 95516 - DNA, 599 bp, Chicken  19866894617658_1
  misc_feature (1)..(45): n is any nucleotide
nnnnnnnnnnnnnnnnnnnnnnnnnnnnnnnnnnnnnnnnnnnnnacgggaagggcccaggctgcacctcgtggtgaatctcggtcaaatgcatcgttcaagcccaggcaaattgagaaaccttccctctggaggcgcagcagagccaagccacgtttgggtgatgccatcgccaagcggagtcacgctgagggcgggctgtgccccatcctgtgacttggcgcagcctgggcaggagggactgagaggctgcaagatgttaatgatgccgcttcgtttgggagtgctaggcttaatgargcgtgactcaacacctcctccacccacctgaattggagccaccagggctggcctcctcttcctcccacctggcccatgtccgtagcagggcatgcgtgccgcatgactcaggtcaccccatccatgtcccagccttacagtgcgcggtgcccagggataccaggtgggtgacgcagcctgggaaagccatgtggacctcatgccaccgtcacacacatgagctgagctcctcagccctgcccaagggtgagacagaacagcaggaaaagcatgttctgggaacccaaatttctgcatgg

SEQ ID NO: 95517 - DNA, 599 bp, Chicken  19866894617679_1
  misc_feature (1)..(46): n is any nucleotide
nnnnnnnnnnnnnnnnnnnnnnnnnnnnnnnnnnnnnnnnnnnnnnatcttttaagagcattttaatttctacaggaaaaagaaatacaaagaacacggttagcatagattacacctgaaaatgatgaattattaaggaactgcttgattttaatactgaagttactatattaagaaatgctttgtacagcactctagagggttggcatcctagattcaaattgccaagcataaataacagttcacattgtctggccaggtagcattggatgctgacatcagtgccatatgtcacactgrgaagcggggctctcttgtatggagggatgtaacggggaactaggacattggctatgttagattttacttctatagtggtggaaattgggatgtgtattgaagcagcccttttccagtgctgtgctggctctgggcagctttgcatggtggctgaaagtgattgagtagtctcatgttcctcctggctttctcctgtactgagaaagattttatgatgaaccccaggcttgttccaacaaatttagcactcctacctcraatcatttttccccccttctttttcagtgctcctctgatta

SEQ ID NO: 95518 - DNA, 548 bp, Chicken  19866894617679_2
ggtagcattggatgctgacatcagtgccatatgtcacactgrgaagcggggctctcttgtatggagggatgtaacggggaactaggacattggctatgttagattttacttctatagtggtggaaattgggatgtgtattgaagcagcccttttccagtgctgtgctggctctgggcagctttgcatggtggctgaaagtgattgagtagtctcatgttcctcctggctttctcctgtactgagaaagattttatgatgaaccccaggcttgttccaacaaatttagcactcctacctcraatcatttttccccccttctttttcagtgctcctctgattatgcaatatagtatattttctgcacttacatagcaatgactggtctcttaatggaccgtaataaaacttgacccatagatgattcttcttccaaaatagttattatattttaatgtggaaggaaatgctcttatagaaaacaatatttttttctcaaaatgagaagcaaggaaaataaatagagaggaagagtaggaaggaaacaaga

SEQ ID NO: 95519 - DNA, 600 bp, Chicken  19866894617692_1
ttctacgttttacacaccagcagtactctgcatctgacagactgaggcttaaaacttgcagctgtctaaagcaatacagtttaagctagcttctgaatgagtctgcagctggatacaaaatctttggtagaggagaaaataacccaaagaattttttttttcattttacctacagtaaaattatgaagcaatgaaaatatttcattggacagatggcagcggaagttaagagtgagacacatactgggtaaccagagcacctcgcagctattttccaccacgtcaattcacagaatactrgatcaataacaagatgagaattaataaatatctttcaaggatatgaaagagctgagttccacaaacataccacatgtgggcttgcactgatgctactcagcacaaagtatttttaggactgggcatatttcacagatcgttttcaagaattattgaggatacaaaaattcccagatttctaaccctccccaaatacttttaaggagaattaactgcaaatcctgaagtctgtgctggaattctactagcatgcatggtgtgtctgtaacatggacagctagcacgctaccttgcgatagc

SEQ ID NO: 95520 - DNA, 599 bp, Chicken  19866894617712_1
  misc_feature (1)..(176): n is any nucleotide
nnnnnnnnnnnnnnnnnnnnnnnnnnnnnnnnnnnnnnnnnnnnnnnnnnnnnnnnnnnnnnnnnnnnnnnnnnnnnnnnnnnnnnnnnnnnnnnnnnnnnnnnnnnnnnnnnnnnnnnnnnnnnnnnnnnnnnnnnnnnnnnnnnnnnnnnnnnnnnnnnnnnnnnnnnnnnnnnatgtaagactgcaagtgcatactgcactgggacacaacagaatactctgtggcttagttaacagagggtggagactgaaatacagactggtctgaagcaacgtacttggaacatacttagtttyaatattgcttctgatttgctaaaaatattaatagcatcaacttactctctagatttgcagaagtcagatactaaaagaaaaattaatacctcttccatcagaattttttatgggatccagaggaaattaatacttactgcgatcatttactttgatctctacataacatgcagtgacccgtaagttaaatgagctcaaactgacacaaattcattaaaagaaaccattctttgaagaatatcactgcaaatttaaactgaaataggcagtggggataaaagctaattgcatggtgttta

SEQ ID NO: 95521 - DNA, 590 bp, Chicken  19866894617715_1
caattaataattataatagatttgccttgagttcctgggtttttttgtttgtttgttttgtaaaatttgtaattactttctttgagtacactgtaattaaaaaaaacaacaatcagaattattcttaatgctagactgaagtctcacactcacaagaattaaatcaacaagttctttccctattattaccttctactattcaagtccaatctcccagtcagaaaattatttaaaacctacaaatccataagatggcctctaaattctcagtgattttgtgaattgtgaatatgagacagrtagaaatgagacctgatcgacaatggtcaaatgcacagctgcccagagagctgtgggtgtcccatccctggagggctcaaggccagcttggatggagccccaggcagcctgagctggtgtgggcaaccctgtccaagccattccgtgataggagacttctttacgacacccatgaaaaagctgttgtcaacagcagtgtgaaggtcctctttcctgctactcatttataagagaaaagattcatcaagagctgttgaaagccacctttgtgctgaatgaaaggaagaggt

SEQ ID NO: 95522 - DNA, 599 bp, Chicken  19866894617717_1
  misc_feature (1)..(101): n is any nucleotide
nnnnnnnnnnnnnnnnnnnnnnnnnnnnnnnnnnnnnnnnnnnnnnnnnnnnnnnnnnnnnnnnnnnnnnnnnnnnnnnnnnnnnnnnnnnnnnnnnnnnntatatagaaaaaaatagatatgactttaactgacatatgacaatagatggttaatcaaaacacgcaaattagggatctttactacataagaacttctttttctttgcaaactacccaggtggtatagtagaaaaggtattagaaagaaagtatgtgatctaaatgtaataaccctggaacattactcattctgatccaygcagctttragtctgttgactttttgggtgtactctgtgaaggaggtaatagcaaagtgaccccaattgccacttcttatggaacttgaattccaggaaaagtgcttaactcatcagacatttgagcctattccttccaagcaaaacatattagtagatacaatttttgaatatttcatataatgagaatcaaaagtctatttccttagaagacaattttgatgtgaatgccatccaagacagttttatttaagacttaaaatgtccttactgctattactcaacaacatacattcaat

SEQ ID NO: 95523 - DNA, 599 bp, Chicken  19866894617717_2
  misc_feature (1)..(92): n is any nucleotide
nnnnnnnnnnnnnnnnnnnnnnnnnnnnnnnnnnnnnnnnnnnnnnnnnnnnnnnnnnnnnnnnnnnnnnnnnnnnnnnnnnnnnnnnnnnntatatagaaaaaaatagatatgactttaactgacatatgacaatagatggttaatcaaaacacgcaaattagggatctttactacataagaacttctttttctttgcaaactacccaggtggtatagtagaaaaggtattagaaagaaagtatgtgatctaaatgtaataaccctggaacattactcattctgatccaygcagctttragtctgttgactttttgggtgtactctgtgaaggaggtaatagcaaagtgaccccaattgccacttcttatggaacttgaattccaggaaaagtgcttaactcatcagacatttgagcctattccttccaagcaaaacatattagtagatacaatttttgaatatttcatataatgagaatcaaaagtctatttccttagaagacaattttgatgtgaatgccatccaagacagttttatttaagacttaaaatgtccttactgctattactcaacaacatacattcaatgagcacaat

SEQ ID NO: 95524 - DNA, 599 bp, Chicken  19866894617733_1
  misc_feature (1)..(118): n is any nucleotide
nnnnnnnnnnnnnnnnnnnnnnnnnnnnnnnnnnnnnnnnnnnnnnnnnnnnnnnnnnnnnnnnnnnnnnnnnnnnnnnnnnnnnnnnnnnnnnnnnnnnnnnnnnnnnnnnnnnnnncgcgatgtctagctgtggggaggatgcaaagggcactgtagagaaacccccatccccctgcagtgctccctcccgacaacccccgtccccgggtgcgataccccgcggccacgttgttgctgttccatctggggtggatgtggatgctgctgacggcgaaggtctgctcggtgccctcactyttgtagatgttgtggtcgccggcgacgacgcggaaattccggttgctggaaagaagcacaggatcaggacctgcactgttattgcttcaggggttaacacaacaggaccaaggaagtgacttggcttggatgaacaaacttcacggagaatactcagatcatgcttttttcctcaacatttctcgtgtatacattcatgttttctctgcgcgtgcaatagacgctcctaattctttattgacaccgtggacacagggatagaaagaaggaatgataatcctayggttctgtgatctttc

SEQ ID NO: 95525 - DNA, 600 bp, Chicken  19866894617733_2
gctcggtgccctcactyttgtagatgttgtggtcgccggcgacgacgcggaaattccggttgctggaaagaagcacaggatcaggacctgcactgttattgcttcaggggttaacacaacaggaccaaggaagtgacttggcttggatgaacaaacttcacggagaatactcagatcatgcttttttcctcaacatttctcgtgtatacattcatgttttctctgcgcgtgcaatagacgctcctaattctttattgacaccgtggacacagggatagaaagaaggaatgataatcctayggttctgtgatctttcaggacccttccagcccagtgtcctacggttctatgatctttaaggactcttccagctcaaccatcctatggttctgtagtgaagagtcatccatacaagaagatgcttccagggatcgttctacttaatggaaagatcagcgaagaccttcaagtccttaacagaaagatcagcaaggactgccactctctgggtggggacagctcattttttcttttttcttttttttctttttcttttttttctggaaaaaatggcattttcaggagacaacggggctccca

SEQ ID NO: 95526 - DNA, 599 bp, Chicken  19866894617737_1
  misc_feature (1)..(149): n is any nucleotide
nnnnnnnnnnnnnnnnnnnnnnnnnnnnnnnnnnnnnnnnnnnnnnnnnnnnnnnnnnnnnnnnnnnnnnnnnnnnnnnnnnnnnnnnnnnnnnnnnnnnnnnnnnnnnnnnnnnnnnnnnnnnnnnnnnnnnnnnnnnnnnnnnnnnncctctctgggagcgcatttgcattcaactgtgtgcaaacatcaaagcagtgaaaattattattattattctttacacacagcccacgctgacatctctgctcccagccatcctcaccatgccagcaacctcccctatgtggggggagccargcacagccctgggggtttgtaaccctccagatgctgcttctcctccagcaccccctgcagagcccagctcccacccagaccccccggccagctgagctgggcctgcaggctgccctgccatggagctgatgrgcaccactgggggtccggtccttccctgcactgcaggcagcccagggtgtgccaggagggagtttgttttcaacgtttcctgttttacagcaaaacaaacaaccccaatcccaactttccacaggctctgtctgcacgggcagggatgagagagctcagagctgcag

SEQ ID NO: 95527 - DNA, 599 bp, Chicken  19866894617737_2
  misc_feature (1)..(17): n is any nucleotide
nnnnnnnnnnnnnnnnncctctctgggagcgcatttgcattcaactgtgtgcaaacatcaaagcagtgaaaattattattattattctttacacacagcccacgctgacatctctgctcccagccatcctcaccatgccagcaacctcccctatgtggggggagccargcacagccctgggggtttgtaaccctccagatgctgcttctcctccagcaccccctgcagagcccagctcccacccagaccccccggccagctgagctgggcctgcaggctgccctgccatggagctgatgrgcaccactgggggtccggtccttccctgcactgcaggcagcccagggtgtgccaggagggagtttgttttcaacgtttcctgttttacagcaaaacaaacaaccccaatcccaactttccacaggctctgtctgcacgggcagggatgagagagctcagagctgcagccacaggagcacagtgggctctgatcagcccattttgcagtgcctcagcatccctcagctctgcttcttttggccctggcgtagctctgcctcccgccaccctgctgggttatttgcggctctgtcagtara

SEQ ID NO: 95528 - DNA, 600 bp, Chicken  19866894617737_3
grgcaccactgggggtccggtccttccctgcactgcaggcagcccagggtgtgccaggagggagtttgttttcaacgtttcctgttttacagcaaaacaaacaaccccaatcccaactttccacaggctctgtctgcacgggcagggatgagagagctcagagctgcagccacaggagcacagtgggctctgatcagcccattttgcagtgcctcagcatccctcagctctgcttcttttggccctggcgtagctctgcctcccgccaccctgctgggttatttgcggctctgtcagtaraggataagtcagcagaggtttgmtgggcactgtgcagacctacggccccatccatagctctgggggcccctgtggggatgcgggcggctcggagcgcacccatcccggctgcggctcgctaggtggcggcagctgctctcgtcccagagcrcggagagagccaagctgtcattttcttctcgatgtttggaagggactctcagctctgcctccctcctgcggtgccgggaactgtgctgcactttcccaaagccctcaggctttgccatcacccggaggtgcccagcgcttcctcggcct

SEQ ID NO: 95529 - DNA, 600 bp, Chicken  19866894617737_4
ttccctgcactgcaggcagcccagggtgtgccaggagggagtttgttttcaacgtttcctgttttacagcaaaacaaacaaccccaatcccaactttccacaggctctgtctgcacgggcagggatgagagagctcagagctgcagccacaggagcacagtgggctctgatcagcccattttgcagtgcctcagcatccctcagctctgcttcttttggccctggcgtagctctgcctcccgccaccctgctgggttatttgcggctctgtcagtaraggataagtcagcagaggtttgmtgggcactgtgcagacctacggccccatccatagctctgggggcccctgtggggatgcgggcggctcggagcgcacccatcccggctgcggctcgctaggtggcggcagctgctctcgtcccagagcrcggagagagccaagctgtcattttcttctcgatgtttggaagggactctcagctctgcctccctcctgcggtgccgggaactgtgctgcactttcccaaagccctcaggctttgccatcacccggaggtgcccagcgcttcctcggcctctccagcaaagcgcgtgccataa

SEQ ID NO: 95530 - DNA, 533 bp, Chicken  19866894617737_5
gagagctcagagctgcagccacaggagcacagtgggctctgatcagcccattttgcagtgcctcagcatccctcagctctgcttcttttggccctggcgtagctctgcctcccgccaccctgctgggttatttgcggctctgtcagtaraggataagtcagcagaggtttgmtgggcactgtgcagacctacggccccatccatagctctgggggcccctgtggggatgcgggcggctcggagcgcacccatcccggctgcggctcgctaggtggcggcagctgctctcgtcccagagcrcggagagagccaagctgtcattttcttctcgatgtttggaagggactctcagctctgcctccctcctgcggtgccgggaactgtgctgcactttcccaaagccctcaggctttgccatcacccggaggtgcccagcgcttcctcggcctctccagcaaagcgcgtgccataaagagaacaacgtgcacgagattaataacacttaaggtcccgttcattcaccatccctgtcg

SEQ ID NO: 95531 - DNA, 600 bp, Chicken  19866894617744_1
aagaaccgggactttttgcactcacttcacctgcaacagaattcgaaaggacataaggaactggcatcacttaaaactcaggatcactgctgaggtgaacgcttctgttcctcctgctgccacattcatacgaatgatttacttccaaaaacaattttgctaatggcttcaggaaaggggttcagtgtttgggacctgtacttgaggacagtggttacaacactatacagtatatccttggtacgtgaatagccctcccagatttatagggttcttgtaagcctataaaacctaactcaraaagagagatttaggctgttgcttggcagttctgcttcccctgtgaaggggagacatggctgaggttgtaaaggtgctgcaggggcagccgaaaagaggctcggttatgggcatgaattatggagaaagctggagacaccccagtctggttaatctaacaaaagggagagtaaaagggtaatctctgagagatacagtgtcctgaaagggaaggaattaatgtggatgagctgtcgaagacagttaataatttaacagctgtaggtaatgggcggacagcacttcctaaggatagatcag

SEQ ID NO: 95532 - DNA, 600 bp, Chicken  19866894617747_1
gaaaacatgttttctctccttttacccttgcctttccttcattccctggtgattcttaataagttcgtcagtgatggacgcaaagccaggcggtagagctgttgttctgcagggtgtgatgctgctgaatcccagaaggcagcatgtctgctgcctgcacccgagcacagggccaggccaggctttgggctgctcgagctccccaggaatcacctgggccctgtgtgcttattttaaaagctgtctgcagaggtcttctatcttgaaaaaaaaaagaaaagaattcaagtgagcagttgyccctttaaaaacgggcaaccaaagcaagtgtttgtgttgcatagcggggagcrctggcttctgcatctgctaaggataacggttacagrtagttacagcatgaagtgacttgcagctttgtttcatagaatggtggaatggtttgggttgcaggggacctagatcatgtagctccaaccccctgctacaggcagggacacctcccgggttgctcacagcctcatccagcctggcactgagcgccttcagggagcaggcatccacagctgctctgggcaacgtgttccgctgccttaccag

SEQ ID NO: 95533 - DNA, 600 bp, Chicken  19866894617747_2
tcttaataagttcgtcagtgatggacgcaaagccaggcggtagagctgttgttctgcagggtgtgatgctgctgaatcccagaaggcagcatgtctgctgcctgcacccgagcacagggccaggccaggctttgggctgctcgagctccccaggaatcacctgggccctgtgtgcttattttaaaagctgtctgcagaggtcttctatcttgaaaaaaaaaagaaaagaattcaagtgagcagttgyccctttaaaaacgggcaaccaaagcaagtgtttgtgttgcatagcggggagcrctggcttctgcatctgctaaggataacggttacagrtagttacagcatgaagtgacttgcagctttgtttcatagaatggtggaatggtttgggttgcaggggacctagatcatgtagctccaaccccctgctacaggcagggacacctcccgggttgctcacagcctcatccagcctggcactgagcgccttcagggagcaggcatccacagctgctctgggcaacgtgttccgctgccttaccagcttcacagtaaagaatttcttcctgatatctagtctaaatttacccttttcta

SEQ ID NO: 95534 - DNA, 600 bp, Chicken  19866894617747_3
gcggtagagctgttgttctgcagggtgtgatgctgctgaatcccagaaggcagcatgtctgctgcctgcacccgagcacagggccaggccaggctttgggctgctcgagctccccaggaatcacctgggccctgtgtgcttattttaaaagctgtctgcagaggtcttctatcttgaaaaaaaaaagaaaagaattcaagtgagcagttgyccctttaaaaacgggcaaccaaagcaagtgtttgtgttgcatagcggggagcrctggcttctgcatctgctaaggataacggttacagrtagttacagcatgaagtgacttgcagctttgtttcatagaatggtggaatggtttgggttgcaggggacctagatcatgtagctccaaccccctgctacaggcagggacacctcccgggttgctcacagcctcatccagcctggcactgagcgccttcagggagcaggcatccacagctgctctgggcaacgtgttccgctgccttaccagcttcacagtaaagaatttcttcctgatatctagtctaaatttacccttttctagtttaaaaccatttctccttgtcctgtcactacgca

SEQ ID NO: 95535 - DNA, 600 bp, Chicken  19866894617752_1
agggatgatggaatgccgcacattgcgtttccatggcagctgtggggacttgacagcaatgcacatctctcatgctttggtttttcttttcttactgttaataggaaagaatcgacatctgtaaattaacaatacagcaattatctgtacagtactgcatatttgtaatacccttgtatatatgttacttgaatacaaaactgttcatttgtgatgctttgcacttggggttggggggagggagggaaacaaactgcaacaaagtaagagtgtgagatgtgagattgtatagagatgaawaagtgtcatcacatcatgtgcatggtgcggaacctgctgttttatctatttattgtgccgtgtttacagttttttgtacactgtaccttcattggttcctgtgctgtagtaaatgtgttaggtagctgtggactccttggtattttgtaaatggtataacataacttggttcccctctgggtccctgagttctctgtgtatcatgtgaaaaatggtgacatacatacagaatttttaaaaaggcatcagtttaaaaatggggaatgtactgttcaatggggatcttcctgttcgagtatc

SEQ ID NO: 95536 - DNA, 599 bp, Chicken  19866894617754_1
  misc_feature (1)..(10): n is any nucleotide
nnnnnnnnnncaggcttttggaaacccccctgtcctggagttatcgattgctcccagtgcaattaagcctcagggctgacgggcaggcagctctgctcctccggctcttcggggagaaaaagaaggtgatctggcctttcctgccccctgttaccaatgggtgcccgtggggaaggctccctgctccgtgtgcgtcctgagagccatgcagagcaggagcagccccactgcaaagcaggggctggcagctccaggtgttggtatgagcacgctgtaaatccagggccaccagagccctcrgctgcctttcccaacggcttatttactgctttcaatacctccctcctttcgctggcagcgctgtctgcagggccaggtttgctctgcaaayggtccgtgtcatttgtcaagaaaccgaattccccttttctctggaacacgcggggctctggggagggctgtgccaaacagtctgcgcagtgctgccctgctctgctcccacacacgcagcagccaactgctccaatacagcagggacacggcaacacaccactgctgagacccagccttgcactgagtcccagctctgacccaagccc

SEQ ID NO: 95537 - DNA, 600 bp, Chicken  19866894617754_2
tctgctcctccggctcttcggggagaaaaagaaggtgatctggcctttcctgccccctgttaccaatgggtgcccgtggggaaggctccctgctccgtgtgcgtcctgagagccatgcagagcaggagcagccccactgcaaagcaggggctggcagctccaggtgttggtatgagcacgctgtaaatccagggccaccagagccctcrgctgcctttcccaacggcttatttactgctttcaatacctccctcctttcgctggcagcgctgtctgcagggccaggtttgctctgcaaayggtccgtgtcatttgtcaagaaaccgaattccccttttctctggaacacgcggggctctggggagggctgtgccaaacagtctgcgcagtgctgccctgctctgctcccacacacgcagcagccaactgctccaatacagcagggacacggcaacacaccactgctgagacccagccttgcactgagtcccagctctgacccaagccctgcattttgctgcagacaggcagacgagaggcagaaatgagccacagcagcgctgggtgcatccccggccgtcacacagcttcgccctcctc

SEQ ID NO: 95538 - DNA, 600 bp, Chicken  19866894617755_1
tcactgagcagagaagaaatagcagaggaagaagaggtgccaggctggtggctgatgcctgtaacaaccaaagagagggaggtggggattctctcacgatgcccacggtaggacataacataatctgatgtgtacttgataacatttctatcagatcccagcaggctagagctcataggcaacttccagtactttagtagagagttagtaatttcaaggagatagggtagtaagaggtaggaaaacaggataaacctgtatctgctatgtgcctattcttactgtctgtggctggctgcrggttcctctgaacgtaatagcttaatagatacgatcacagaccaggtgacacttagaaaaaatatgaatttgaacacatatcataggtctttataatgtgtggtgcaatgtgatactagcaacctttagttcatggaaattcagaactcacgcctttaattctggaaggtgaagacggtggcatagcaggcagagagctgctgcttggagctcttttacacaagagaatgctaccacagtctctttagaacaatttcctgaagctagatgaaagttcagaacagcctgttgaatctctct

SEQ ID NO: 95539 - DNA, 600 bp, Chicken  19866894617759_1
ggactcaatgacaggcttacaaggaaggatgtcagttacgtttgccagtaagacagaggaagaaacatccgggctctgctgttggatcctatttatcccagtgatggatagaggtacagctgttccactggcttcataaagaacaaggctccctggcttcccacagcagggcctcaatggcagccgtaacgaaaacaaaccaggaaaccaactgcactgtccgcacattacaagtgacccattgagaaacagagaaagttgcatcatttacacatccagttctttgaaacagcgttaccsagcccgaattacacgcttctgctcacagctgctccaaagccctgctgaaggacacctggaacacggtgcctggagcctctgctgcaggcagaaaccacagcgcaggcagcagctgcagcctggtgaaggttcttccgtgctgcaactctctcaccttcctgctgcaagccttggctcaaagagctcactattttctgtgaagatggaagcaagacttatcctaaaggtaattattaggaacgccgacagctctcccctccattctggtaaccgggayggctcctcagcacagatggacca

SEQ ID NO: 95540 - DNA, 600 bp, Chicken  19866894617759_2
agttctttgaaacagcgttaccsagcccgaattacacgcttctgctcacagctgctccaaagccctgctgaaggacacctggaacacggtgcctggagcctctgctgcaggcagaaaccacagcgcaggcagcagctgcagcctggtgaaggttcttccgtgctgcaactctctcaccttcctgctgcaagccttggctcaaagagctcactattttctgtgaagatggaagcaagacttatcctaaaggtaattattaggaacgccgacagctctcccctccattctggtaaccgggayggctcctcagcacagatggaccagtgaagttctacagcaagttcttcaaactccatctgctcaytaaaatggacatcccgatgctcagagtacaagcagagatgctgctgatgaacacaagcaccgaagcagggaccaccaaacttcagataagctcagcacagccctccagtgacctctaagcgtgaccagatcacatccagactgatggttttggaattttctggactccagtaggctcacgtactgcatatgctatacccacttacagccagcactgcagtccacgttaatggccga

SEQ ID NO: 95541 - DNA, 600 bp, Chicken  19866894617759_3
ctgctgaaggacacctggaacacggtgcctggagcctctgctgcaggcagaaaccacagcgcaggcagcagctgcagcctggtgaaggttcttccgtgctgcaactctctcaccttcctgctgcaagccttggctcaaagagctcactattttctgtgaagatggaagcaagacttatcctaaaggtaattattaggaacgccgacagctctcccctccattctggtaaccgggayggctcctcagcacagatggaccagtgaagttctacagcaagttcttcaaactccatctgctcaytaaaatggacatcccgatgctcagagtacaagcagagatgctgctgatgaacacaagcaccgaagcagggaccaccaaacttcagataagctcagcacagccctccagtgacctctaagcgtgaccagatcacatccagactgatggttttggaattttctggactccagtaggctcacgtactgcatatgctatacccacttacagccagcactgcagtccacgttaatggccgagcatcagctgctgtactttcatctgtagaacagattcccctccccagaggaaacgagtggaaaa

SEQ ID NO: 95542 - DNA, 559 bp, Chicken  19866894617773_1
ctcactcccctccctcaaaaaagcacaacagaaacaccttttgtattagaacatatgattacacagctcattgttcatgttctcttctattttaataacaatgaagaattaatcataaattttcagaggaaaaggaagggctgaacttctcacatcacagacttgtcctctctcaatttcattacagtcattcctgtattcgataacatttttatgtacattgacataaagtatgacttggaagaaatatttaaacatcaaataaaattgaatattctattatatattttataagtggcratagccaccctttgtgccaccttctgaccatccagtttgcgtatttttcttgcatagggacatcatggattgaacacccacttcataccttcatcttctcagaggtttggcttcaacctcttaactttttttgatgtaagcaaaggactttccttgaggagtgaaaaatgaagagagggagaatatctttgactttcagggtcctagctcttttagtctctggttgggtactccctctataagacatagaatctgaaac

SEQ ID NO: 95543 - DNA, 600 bp, Chicken  19866894617786_1
ccgcacagcccggccggccccgggcagcccgcagcgggagcgggagcggagcgggcgggcagagcgcggcggaaagttggggagagggcagcggccggggacagccgcggggacgggcattgcgaggcggtcgaagttactagcagcaagcagccatccctaccttccggactttctctgggtttacaaacggcagctaggcagatccagaggaaagtgtgtgagggaaataataaaggaagatcgttagacaccggtataaaatcacagcaacaaaccaagtacaacccgaataagggraaagggctgaggaagtagcaagtcaaaggaactaaccatgcttcgagtgaagtttccccatttctctgcattgatctgcaattacgattcatttgactgctttcggtagggtcaggtgctgttgtcgttcttatttttgtagccgtataaaatcccagcgtgtttagaaatccatgtgctccgcttctccccgctaaagcacgagcaagagcgaatctcagctccctcccgcagcacggtccggcgtccccctctcagctccagccttcctcctctctcctctctttcccaaagacagag

SEQ ID NO: 95544 - DNA, 600 bp, Chicken  19866894617800_1
attatccgttccataaccttccccggcaccgaggtgagactgatagatctgtagctactaggatcacctttctagccctttttgaagatgggcatcacatttgccagtctcgagtctgccgggacatccctggttagccaggatgccaaaggacggagagtggtttggcgaccacatctgccaactccctcagcactctagggtgcaatccgtctggcctcatggacttgtgagtatccagctctaggagcaggttcaaaaccatctcatcatggattatgcagggcctattctgttccycatccctatctaccagcacaaggggctgtgtgcccagggagtaacaagtcttactattaaagactgaggcaaagaagacattaagcactcagccttatcctggtccttggtcaccaagttgccctcagcgtccaacaagagatggagattctgcctagccctcttcttgctgctgatgtatttatagaaatttttatagttgtactttactttaatggccaagttcagttctggctgggctttggcttttctaactttttccctgcccagcttcactacatacctgtaatcatcacaaat

SEQ ID NO: 95545 - DNA, 600 bp, Chicken  19866894617801_1
cgaatgcattttgatggcaactctgcatcgtggattgtaccattgcttctccagtgtctttctcatgggtgccaattaacccttttcagtgcctgtgcttgtctgtaggtgtcacattgtgatggaaggacaaagctctgtttgtcaccagttggtggaatgcaaagcccacttgtgctatcccaggggctggcacactgctgctgccttagctgtaccttgacaaatggggccacaacaaatatttctgtgacgtgaagctcataaacactaagctatatggaacacacagctggaatscagtactgctattgctgtgcctctctcaagtgacggacgtgagaactctctgtgccttggcaagaaactggcattctcatgattgtttgcaacatgctattgatgatgaatagatgagcacgggtgcaaacatgcttctgagttcgtgactggactgcaccctttgcaaacatgtttcttcctgaactgggacacagcagtgactgcggcatcactctgttgttcctgtctaccacattcactgactcagtgattatgggtcagaagaatagctggataagttactgtgcccactggact

SEQ ID NO: 95546 - DNA, 599 bp, Chicken  19866894617826_1
  misc_feature (1)..(213): n is any nucleotide
nnnnnnnnnnnnnnnnnnnnnnnnnnnnnnnnnnnnnnnnnnnnnnnnnnnnnnnnnnnnnnnnnnnnnnnnnnnnnnnnnnnnnnnnnnnnnnnnnnnnnnnnnnnnnnnnnnnnnnnnnnnnnnnnnnnnnnnnnnnnnnnnnnnnnnnnnnnnnnnnnnnnnnnnnnnnnnnnnnnnnnnnnnnnnnnnnnnnnnnnnnnnnnnnnnnnntttatctgttgcatagctttagtaacgacagaagtttcttcaggtatattttctactgaggacagaaacatcatttttccagtttgyctttcctcatggtcttggttttcctggtggtcctttccatccattgtgttcttacacaagtacacaagattttatttttttttacctcataattgcaaagtggaaaaattgtttttcaataccaatataacagtaaaagaaagacagtagctctgatgcactatcctcaagacaccaaatattttaatacagctactcgcaaaattaaacaaggaaggactctcttattggaaagaaaagtgattttttaaaattttatttctttagtggtccacgcaacagcaccaagcatatggatc

SEQ ID NO: 95547 - DNA, 600 bp, Chicken  19866894617835_1
gcagcagctccacttacactgctgctgttgttctaacataaaaagcagttacttctgcactactttgagtatatgtgagagcagctaccagtcctttactctaacagctctctagatgcagttttactctagaaaaaatggaaatgctaaatagttctttaagagcagttctttcctggttcagtatatcatctgctcagttctcagctcagtattagcagaatttatcagtaattccaaggaggtcagaaaaagttcctttccagcagtatggtggtgggtttttttttgttgttgttktttgkttttttttggtttttttttttgtgccttgtccagccttatgcacactgagatcaataatttgagtcatttgaagacatccttgcacgatctttgaagagcaaaaggctcttttggagctagaagccttagtcttctcagtcaggagcagacccttggcatggaggctcatcctgcccactgtaagttgtacctgaacacaacagtacaggattagtcaagcttttgactattccattacagcgacaacatgatactgtcacccatgataaagacacctcaagaacagtcagtata

SEQ ID NO: 95548 - DNA, 600 bp, Chicken  19866894617835_2
agctccacttacactgctgctgttgttctaacataaaaagcagttacttctgcactactttgagtatatgtgagagcagctaccagtcctttactctaacagctctctagatgcagttttactctagaaaaaatggaaatgctaaatagttctttaagagcagttctttcctggttcagtatatcatctgctcagttctcagctcagtattagcagaatttatcagtaattccaaggaggtcagaaaaagttcctttccagcagtatggtggtgggtttttttttgttgttgttktttgkttttttttggtttttttttttgtgccttgtccagccttatgcacactgagatcaataatttgagtcatttgaagacatccttgcacgatctttgaagagcaaaaggctcttttggagctagaagccttagtcttctcagtcaggagcagacccttggcatggaggctcatcctgcccactgtaagttgtacctgaacacaacagtacaggattagtcaagcttttgactattccattacagcgacaacatgatactgtcacccatgataaagacacctcaagaacagtcagtatattaac

SEQ ID NO: 95549 - DNA, 600 bp, Chicken  19866894617841_1
ctgaccagacatcatccaggctgcaagggcaccgggatgtcaccctttacaagtaaaagaggccttgctgcagcctcctgaccatccctaactctcttgagacacaggttgctctttggctgtttggctcttctcctggtgggaaaaaaggaaaactaaagaaaaatacacattgagcttcagtgcaaaatcctgtaacactcagggcactgcagctctgctaacacagccctaaatccatccttgcactgctttcctcagctgagctcctcagcaagatgtggtgtgtgtggcacgtakcacacattgctgctgctggtgtgcaggggagctcatgtcagtctatgtggatggctgtgggcaaacagtgtgcaaacacacgtgtgtaagtgttcactgccatttactgagcgtagtgcagtgagtcatgcacctggaagtttaaactgtgatatgttttaattggatggttttaacagtgatgttagaagtgttactgctggcaccgctcactgtggggtgtattactggggagcattgtggggagcagggatactcagctttgggaatggatgctgtgactcagcagtgctttattgg

SEQ ID NO: 95550 - DNA, 599 bp, Chicken  19866894617854_1
  misc_feature (1)..(11): n is any nucleotide
nnnnnnnnnnntttaaaatcagcaaacatgacccatagcaaaagagctgcaaaaagcacaaataatatcctcagaagatcacaaaaggcatgccttagtaaattctaaattgcctacaccttgctagacaaaaaaatctctgaaatagaatgagtagcatttcaaagctttccagtttgctgaaaatatcctgctgtcaataaaaccctgcacgtgctggctctgcaaagagttaaaaaggagaaaggttgttacatcaatctacatatttccatccaaaccaactgagagcagccttgraattattggggtttttcttaatcaagcacagatgaacaaagtaggctgcatgcattatattaggaaatttctccatattcactagataattagtaactataaacctgattgaagtctagttttcaagctgaaaagtgacaagaggatttcaaaacatttggggaagaggggggagaaagaagtcaacagcgggaattgtcactgcatacgtgcactgtgatttgacttacattttttcatgacacactgaaaattatgattaaaatcagagatgtggcacaacatagacaataagagac

SEQ ID NO: 95551 - DNA, 599 bp, Chicken  19866894617856_1
  misc_feature (1)..(4): n is any nucleotide
nnnntactacttaaatacttaaggtaaagtctttacttatatgaaattaaaagacgtgctaatcatttttgagaatttcaatcgagaatgatctattttgcagtttttaagctgcaaatcatgtgttgtatattctattcaaactattaatttcccaatagaggaatattgaagctgttgtgcaaattgctagcaaaattccatctgttcaggaaaaagtaaaaccaaagtggcgcacaggcagggaaaagtatgatggagaaattattttatgaggtaaatgagaagatggtggctttyttaatttaggattttttaaggctaaaatggagtgtaattgctttgagtgtatatatattggaattatagaaatatatttctatatattgaaattatagaaactcaatattttggtatgtgaacatgtgcattggataaaagtagaacgtagggcagaaatacaaataaatgtcctaattgccagaagatttgagtagccctcccagttcagattagtataagagaaagtaaatgcactttagatggatagaatttaagggaatagcatgttttggtatctttggtagcaggggatttat

SEQ ID NO: 95552 - DNA, 599 bp, Chicken  19866894617860_1
  misc_feature (1)..(23): n is any nucleotide
nnnnnnnnnnnnnnnnnnnnnnnttttttttttcctgttgtattttcttatttaagatattgcagagaaatgaggttagatggtcagccgttacagcatatccacatttatagatcttaactggctttccatctggcatggatcaaccattttactgtactgccaatttttttcaaatctctttacgggtaggaaaatggttgttctacattagctgttgtttcatataagcaaaaccattctcagtgctgacagatttatgattaaggtggctgcagaaatgttcccaccatcagtgcrtaatggatgctttgtcagtaagcaattttcctccattcacagaggtacaattaccatctttgctggactgagtacagttttgagtgcttcatggagctttagtgtttctagttgtctgcakacaacagcagttcatctcctgtctgatccagctagatacctcatacagatctaagatcacttagaatttgttttctgagacgtctctgaattaggtcttgtgtgcatagtagtkactacatccagaaaaaggcaacaaatgtaacgaggggactggagcacaggtcttatgaggagca

SEQ ID NO: 95553 - DNA, 600 bp, Chicken  19866894617860_2
tggctttccatctggcatggatcaaccattttactgtactgccaatttttttcaaatctctttacgggtaggaaaatggttgttctacattagctgttgtttcatataagcaaaaccattctcagtgctgacagatttatgattaaggtggctgcagaaatgttcccaccatcagtgcrtaatggatgctttgtcagtaagcaattttcctccattcacagaggtacaattaccatctttgctggactgagtacagttttgagtgcttcatggagctttagtgtttctagttgtctgcakacaacagcagttcatctcctgtctgatccagctagatacctcatacagatctaagatcacttagaatttgttttctgagacgtctctgaattaggtcttgtgtgcatagtagtkactacatccagaaaaaggcaacaaatgtaacgaggggactggagcacaggtcttatgaggagcatctgagggaacagggattgtttaatcaggagaagagaaggctcaattgaaaccatattgacttctataactgcctgaaaaaaggttgtggtgaggtgagagtcagcctcttcccccatgtaa

SEQ ID NO: 95554 - DNA, 600 bp, Chicken  19866894617860_3
accattctcagtgctgacagatttatgattaaggtggctgcagaaatgttcccaccatcagtgcrtaatggatgctttgtcagtaagcaattttcctccattcacagaggtacaattaccatctttgctggactgagtacagttttgagtgcttcatggagctttagtgtttctagttgtctgcakacaacagcagttcatctcctgtctgatccagctagatacctcatacagatctaagatcacttagaatttgttttctgagacgtctctgaattaggtcttgtgtgcatagtagtkactacatccagaaaaaggcaacaaatgtaacgaggggactggagcacaggtcttatgaggagcatctgagggaacagggattgtttaatcaggagaagagaaggctcaattgaaaccatattgacttctataactgcctgaaaaaaggttgtggtgaggtgagagtcagcctcttcccccatgtaactggtgataggatgagagggaatggcctcaagtggcatcaggggagtttcaagttggatattaggaaaaaaattctgagaaggaatgctcaggtgctggaatgggctgcccagg

SEQ ID NO: 95555 - DNA, 600 bp, Chicken  19866894617864_1
aacactgacgatgcagggagcttcatggcacagccttgctccagaagatgcaggagcggcgtctcccccagaaagcagcgtgctgtgcgggccgcctggctccagctgctcccacaggcctccagctctgcctaacaaaggctgcgggctcacagatgcagcgagacgccgagccggcaccatgcggctcgtagctcttcatggatcacagcctacggtttagcaatcacttagaagcctcaatttattctctaagctcctactgccagggaagcgcacggtgaaagcacctgctgtccygctcagtctcctcagtcaccaatagccacgaggtgtaattttatttaatttataaactgctcaactgaccacaccacagagtcacataaagccctctaacaatggcacctattggagcaggtactgaacatcatctggtaaccatgtaggggtggttgttgaggacttcacaaacacgttctgggtaaatagatttacaaagcttttattcacagaaatgacagctgacaaccagaagctgccacaggtagcagcccccagaacagaacccaggctcctccgaggcactgctctccttcc

SEQ ID NO: 95556 - DNA, 599 bp, Chicken  19866894617865_1
  misc_feature (1)..(169): n is any nucleotide
nnnnnnnnnnnnnnnnnnnnnnnnnnnnnnnnnnnnnnnnnnnnnnnnnnnnnnnnnnnnnnnnnnnnnnnnnnnnnnnnnnnnnnnnnnnnnnnnnnnnnnnnnnnnnnnnnnnnnnnnnnnnnnnnnnnnnnnnnnnnnnnnnnnnnnnnnnnnnnnnnnnnnnnnnccatcacccttggccacgggccacccacctgctgctccatgaactccttcaccaccacccggtaggagctggagaacagggacaaaaagccacgatttttgccagggaatccccccaaagcagagcccatrgggatactcacgctatgtgccggctgcggatgcggggcaggtagggcagcttcttgacaatgatggtgccatcgtagaaggaaggctggcacttctgggtgatggcgttggccacgagcacagccagcacgacgggcagcacgtgggccatgtggccagtggcctcacacactagcagggcggtggagacggagtaggtgacggcacccgaaaaagcagcagcgcctacggcatgaggcagtggtagcaytggcacaaggattggggtggccccactgtccccaccccaacagtgtcac

SEQ ID NO: 95557 - DNA, 600 bp, Chicken  19866894617865_2
acaaaaagccacgatttttgccagggaatccccccaaagcagagcccatrgggatactcacgctatgtgccggctgcggatgcggggcaggtagggcagcttcttgacaatgatggtgccatcgtagaaggaaggctggcacttctgggtgatggcgttggccacgagcacagccagcacgacgggcagcacgtgggccatgtggccagtggcctcacacactagcagggcggtggagacggagtaggtgacggcacccgaaaaagcagcagcgcctacggcatgaggcagtggtagcaytggcacaaggattggggtggccccactgtccccaccccaacagtgtcacccacttaccggccagtgcatatccaccggggacaatggggtacgccgcgccctctgcatggatgccatgggggaagagagaggccaacacctccccctgcaaccgcccaatggctgctcctgtggggttgggagggggggagagaagcgctcaagacccccaaggaacaccccccaaaaaatacagagctgtggcaaccccacacactcccgcatctgaagcaacacccagaccccctgaacgggaccagg

SEQ ID NO: 95558 - DNA, 600 bp, Chicken  19866894617894_1
aatcgagatggccatacgaacagggagccaactctcaagctgttaagcataagactcaattcagctgtttctgcttcagtgaatactgtggcaagatacagaaacacatttataaattaaaacatttgaaactgactgctgtatcttgcaggatttactacagattggttgaagtctgatactttaggcggaatacctgtcagcagttggtgaacatttctggttcaatttcctccaaaggaactctcttttattctgaacaggtttgaaatattcagaaagcagtaagtaagatcactragagttcccatacaaaactgattccagacccaaatacaagttgaacaacacaggatggtttgaagttggcaatgacccctgggaggttacctggcccaaccctgctctagcagggacacccagagcagggtgccacatccaggcagctctggggagatctccaaggaggagcccccacagcctttgggcagcctgtgccagtgctctgtcacccacacacaccagaagtgctggtattcagagggaacctcctgtgctccagtttggggtctgtggcctctggtcgtggcactggacagc

SEQ ID NO: 95559 - DNA, 599 bp, Chicken  19866894617896_1
  misc_feature (1)..(169): n is any nucleotide
nnnnnnnnnnnnnnnnnnnnnnnnnnnnnnnnnnnnnnnnnnnnnnnnnnnnnnnnnnnnnnnnnnnnnnnnnnnnnnnnnnnnnnnnnnnnnnnnnnnnnnnnnnnnnnnnnnnnnnnnnnnnnnnnnnnnnnnnnnnnnnnnnnnnnnnnnnnnnnnnnnnnnnnnncccatcatttcttgggcataaatattaggaaaagccttgaaacaatttgtcttctggtagatcctttaagcttagtccaattggttgggctgatgcttctcacaaaggcacccttaacccttctgcaatcrgttgctgttattgacaagcagacagtcaaaatttgccacaggacatcactggcaccaccactactacttgcttttactgaacaactggttaaaggacatttaaaagggaataattaaaggagtaaagaattaagagtgctttytaacagtcttttgcctgaaggtttttctggaggaattaactcttatgtttggaaattcacttcagaaaaagaaatccttgtttctttctggcttaacgttgtgcttcaagatgtgtcgtgctctaaaaataagtctactttgatccacatttgtgt

SEQ ID NO: 95560 - DNA, 599 bp, Chicken  19866894617896_2
  misc_feature (1)..(26): n is any nucleotide
nnnnnnnnnnnnnnnnnnnnnnnnnncccatcatttcttgggcataaatattaggaaaagccttgaaacaatttgtcttctggtagatcctttaagcttagtccaattggttgggctgatgcttctcacaaaggcacccttaacccttctgcaatcrgttgctgttattgacaagcagacagtcaaaatttgccacaggacatcactggcaccaccactactacttgcttttactgaacaactggttaaaggacatttaaaagggaataattaaaggagtaaagaattaagagtgctttytaacagtcttttgcctgaaggtttttctggaggaattaactcttatgtttggaaattcacttcagaaaaagaaatccttgtttctttctggcttaacgttgtgcttcaagatgtgtcgtgctctaaaaataagtctactttgatccacatttgtgttcaggagtagattgcagttaaaaggggatagtgcataggacataccaatgaggtataccagtcctttctaatgaaggaggaaaaaaggcatacaactcaattttggtctgcctgaagggattcttatcatctcctattctaac

SEQ ID NO: 95561 - DNA, 600 bp, Chicken  19866894617907_1
gacaaaggagtgtcaaggtagagggagaaacggcctcttttctaccagtgcagcagactctgcttccgtttttatgtttctgatgatccataaagaaagtaaatttactgcaaggatgcacaccataatggagaatcctaatccttcaacaccactaaatgtggttacattacctttaggcactgtgagtatcacaagtatcactgttttcaataaactactcatcaagtttagccatacctggaagaatatagacagctgaagctaatactgcggtacacagggacacatacatgtccrtataatgatgggtaaccatgtgctcatgtgggatgaactggagaattgttgttgaggcaaacatgcacaaatcacaatatttggactggttttgcaacccacaaatgatgggtctctgcagaacttaatgaaatgacaayttaarcccctcccgctcccaatccatctttcaacaagaattaatatttcttccggagattaaaaaaaaaaattacactgacacratatgtatcaagacagaaaaaaagatattaaaatattaagccccttaaatttcaagtgctattgtctttcctgcta

SEQ ID NO: 95562 - DNA, 600 bp, Chicken  19866894617907_2
atccttcaacaccactaaatgtggttacattacctttaggcactgtgagtatcacaagtatcactgttttcaataaactactcatcaagtttagccatacctggaagaatatagacagctgaagctaatactgcggtacacagggacacatacatgtccrtataatgatgggtaaccatgtgctcatgtgggatgaactggagaattgttgttgaggcaaacatgcacaaatcacaatatttggactggttttgcaacccacaaatgatgggtctctgcagaacttaatgaaatgacaayttaarcccctcccgctcccaatccatctttcaacaagaattaatatttcttccggagattaaaaaaaaaaattacactgacacratatgtatcaagacagaaaaaaagatattaaaatattaagccccttaaatttcaagtgctattgtctttcctgctaaacattttccaygtctccaaaaacaaacactattcagagtttagcccaagcttccgagacaccaattacacagcagcactcgaggactgtcatctgaatgtaaagacaaatactgtccagatagcacataccagctgcca

SEQ ID NO: 95563 - DNA, 600 bp, Chicken  19866894617907_3
tcaacaccactaaatgtggttacattacctttaggcactgtgagtatcacaagtatcactgttttcaataaactactcatcaagtttagccatacctggaagaatatagacagctgaagctaatactgcggtacacagggacacatacatgtccrtataatgatgggtaaccatgtgctcatgtgggatgaactggagaattgttgttgaggcaaacatgcacaaatcacaatatttggactggttttgcaacccacaaatgatgggtctctgcagaacttaatgaaatgacaayttaarcccctcccgctcccaatccatctttcaacaagaattaatatttcttccggagattaaaaaaaaaaattacactgacacratatgtatcaagacagaaaaaaagatattaaaatattaagccccttaaatttcaagtgctattgtctttcctgctaaacattttccaygtctccaaaaacaaacactattcagagtttagcccaagcttccgagacaccaattacacagcagcactcgaggactgtcatctgaatgtaaagacaaatactgtccagatagcacataccagctgccagttcc

SEQ ID NO: 95564 - DNA, 524 bp, Chicken  19866894617907_4
tcaagtttagccatacctggaagaatatagacagctgaagctaatactgcggtacacagggacacatacatgtccrtataatgatgggtaaccatgtgctcatgtgggatgaactggagaattgttgttgaggcaaacatgcacaaatcacaatatttggactggttttgcaacccacaaatgatgggtctctgcagaacttaatgaaatgacaayttaarcccctcccgctcccaatccatctttcaacaagaattaatatttcttccggagattaaaaaaaaaaattacactgacacratatgtatcaagacagaaaaaaagatattaaaatattaagccccttaaatttcaagtgctattgtctttcctgctaaacattttccaygtctccaaaaacaaacactattcagagtttagcccaagcttccgagacaccaattacacagcagcactcgaggactgtcatctgaatgtaaagacaaatactgtccagatagcacataccagctgccagttcctgt

SEQ ID NO: 95565 - DNA, 436 bp, Chicken  19866894617907_5
taaccatgtgctcatgtgggatgaactggagaattgttgttgaggcaaacatgcacaaatcacaatatttggactggttttgcaacccacaaatgatgggtctctgcagaacttaatgaaatgacaayttaarcccctcccgctcccaatccatctttcaacaagaattaatatttcttccggagattaaaaaaaaaaattacactgacacratatgtatcaagacagaaaaaaagatattaaaatattaagccccttaaatttcaagtgctattgtctttcctgctaaacattttccaygtctccaaaaacaaacactattcagagtttagcccaagcttccgagacaccaattacacagcagcactcgaggactgtcatctgaatgtaaagacaaatactgtccagatagcacataccagctgccagttcctgt

SEQ ID NO: 95566 - DNA, 599 bp, Chicken  19866894617914_1
  misc_feature (1)..(148): n is any nucleotide
nnnnnnnnnnnnnnnnnnnnnnnnnnnnnnnnnnnnnnnnnnnnnnnnnnnnnnnnnnnnnnnnnnnnnnnnnnnnnnnnnnnnnnnnnnnnnnnnnnnnnnnnnnnnnnnnnnnnnnnnnnnnnnnnnnnnnnnnnnnnnnnnnnnncggccatcctgctgcctgcttcattactgctcatttgcattctcaaagcatatcatttaatgacaactcttttggagcagaaactctccattcatcagagatacgcatggactccaccaaggcagtcagggctttatgaatctccacataayattaaattaatacgatggtaatttgtcagcctggcatctctgtttctagcaggactgagacaagggcaagaaatggatgctgagcttttccccagcctgaagtctttgtgtctggtgctagaaaatcatgagacacagcagcataaaggttccatgggctccttgcagcctggctttgctgtgctgacagactcctagccctgaacctgactcagagcaatttgcagcccctgaccctctgttttacagctctgatgctgtgcagagcagaaagcctttctgctggagccctctgtgtg

SEQ ID NO: 95567 - DNA, 600 bp, Chicken  19866894617914_2
aaaagacctccaagaccatgcagtacaaccatccacctatcaccagtatttcccactaaaccacatccctcagtacaacatctcaacgtttcttgaacacctccagggatggtgacaccacctcctccctgggcagcccattccagcacctgaccaccctcttggagaagaagtacttcctatgtccaacctgaatgtcccctggcacaaccctcagccggatctattcaccactggacattgcttgagcaggaatgcaggtaggaaggctgcagaaggaaatgaaatggtcgtaacccwccccagaactggcattcacaccagagtcctaagggaacccaaggacaaaatggttgctacaggcaacctctggcttgcagccaccatgggattggagaattgtgcaggttatgctggcttcacaaatcgaaaagaatcctcagacgtgtagggaaatggctaaaggcagtgttctgggagagagtcaatgcagccatgctcaggggaagccaagccactaccaaaggagcccacagaccccttcccaaggagatcatcatctacagagagcacactgagggacagctgaggggactgata

SEQ ID NO: 95568 - DNA, 600 bp, Chicken  19866894617923_1
ctagataaaaagcaatttgagaggaaaataacagtgcagtttctattctgaattgtcggagaacagtcagttagcatccataggagatagatgcaacaaaatcacaacataagaagaggaaaggatttcttagcacttactatggtcaagaattggaatggagctaggggacacagttaagtgaaaggagtttgtaggtcaggttgatggttggatttggtcatctcaaaggcttttttccaagctacatgatcataggattctaaaattctaaagtcatagcagtaagttgttactttkttgttgttgttgttgttaatgagtctttgttccacagatactattttatcagcaggcttcatgagattattttctaatatgagattctgacatggtgaattttagtctcagcactgaaaggaaaggcattgttttttctcagtctcccaaatatggcctctgatgttctactttctgcaccttgggctctgctgaccagtcacatcttgagctgcctgttaataattccttaataaaaggctacaggctagtttacttgtaattaattaaactgaaaaacagaattctcaggcaatatat

SEQ ID NO: 95569 - DNA, 600 bp, Chicken  19866894617923_2
gtaatttagttaagtttggatttaaagctctggaaatttcactgagaaacaacagaaacttttaattcaaagaattggcctggttctactggattgtctcagtaggttttcaaatggttaaatgtcctttttcaaacactgcaggatgtcttgaagagagattccattgtggagaggtatgaagtgtgaaatattggaagtcagaatgatgtctggcggctcctatatgggtgagatcaacacacagaaactgatttattttaaaacattactctttctactttgcttaaatgtatagtytagtgaaagcagtgtttcatttcctgcagactcctaaaagaaaaagtcaacatctttcacactgtcagatttactaggcaatcacaattattatgcaaatagagtactccagaacctgatctaaaaataggagaatcgtaasatatcactgtagataaaagcatgagagagatcagactgaagaaatacggctaaaaataagctagaaagcagatataaacatagctgcatatgacataatattccatcagactactgattcctttaatctcagtttcytcygaatccaatagtctcttc

SEQ ID NO: 95570 - DNA, 600 bp, Chicken  19866894617923_3
aggatgtcttgaagagagattccattgtggagaggtatgaagtgtgaaatattggaagtcagaatgatgtctggcggctcctatatgggtgagatcaacacacagaaactgatttattttaaaacattactctttctactttgcttaaatgtatagtytagtgaaagcagtgtttcatttcctgcagactcctaaaagaaaaagtcaacatctttcacactgtcagatttactaggcaatcacaattattatgcaaatagagtactccagaacctgatctaaaaataggagaatcgtaasatatcactgtagataaaagcatgagagagatcagactgaagaaatacggctaaaaataagctagaaagcagatataaacatagctgcatatgacataatattccatcagactactgattcctttaatctcagtttcytcygaatccaatagtctcttccttcacctttttctctccgcaggtacttacccttcgtacatttgtccattttttcccaagtgctgccttgcctttgccggtagccactcattagcctacatttcttcagctcgctgtattccagttgccatctccctactta

SEQ ID NO: 95571 - DNA, 509 bp, Chicken  19866894617923_4
actttgcttaaatgtatagtytagtgaaagcagtgtttcatttcctgcagactcctaaaagaaaaagtcaacatctttcacactgtcagatttactaggcaatcacaattattatgcaaatagagtactccagaacctgatctaaaaataggagaatcgtaasatatcactgtagataaaagcatgagagagatcagactgaagaaatacggctaaaaataagctagaaagcagatataaacatagctgcatatgacataatattccatcagactactgattcctttaatctcagtttcytcygaatccaatagtctcttccttcacctttttctctccgcaggtacttacccttcgtacatttgtccattttttcccaagtgctgccttgcctttgccggtagccactcattagcctacatttcttcagctcgctgtattccagttgccatctccctacttattcattttcatgtgttgtagcaagttacaaggttcttccttttttt

SEQ ID NO: 95572 - DNA, 506 bp, Chicken  19866894617923_5
ttgcttaaatgtatagtytagtgaaagcagtgtttcatttcctgcagactcctaaaagaaaaagtcaacatctttcacactgtcagatttactaggcaatcacaattattatgcaaatagagtactccagaacctgatctaaaaataggagaatcgtaasatatcactgtagataaaagcatgagagagatcagactgaagaaatacggctaaaaataagctagaaagcagatataaacatagctgcatatgacataatattccatcagactactgattcctttaatctcagtttcytcygaatccaatagtctcttccttcacctttttctctccgcaggtacttacccttcgtacatttgtccattttttcccaagtgctgccttgcctttgccggtagccactcattagcctacatttcttcagctcgctgtattccagttgccatctccctacttattcattttcatgtgttgtagcaagttacaaggttcttccttttttt

SEQ ID NO: 95573 - DNA, 600 bp, Chicken  19866894617925_1
caaacgaacaacaacaacaaaaatggttatgtccgtccctacccaaaatcacattttgaaaatatgttctctttttaaatttcaccttcttttctttatcagttccagcaataaccagctgaaatactgtttttcaagtaacaatgaaacaagccacttgtttcacttccatttttcaagtttcacacaagtggacttcataataagtaagatttcaaagatagcctgatgtttgaattcactgaactttaatcaacaaaaattgtggttaaactcaggctctccaaacccaaaagcacrttccatgcagtatttcagatcaaaacagaatggatatctaactttttttggtggttgtgttgataaaaagtaagcaatacgtaaaataccataatataagttaatataagtatatatgagttaattcatccagttaattcatccagttaattcagcagcttggagaagagttcattatgattattgtttggctcaacttgaattcataacagactgccaagtattgcaaaaataagcatgctacaaaataaaaytgattattttcttaatcagatgagctgtattgtcactattttcttc

SEQ ID NO: 95574 - DNA, 600 bp, Chicken  19866894617925_2
aacaaaaattgtggttaaactcaggctctccaaacccaaaagcacrttccatgcagtatttcagatcaaaacagaatggatatctaactttttttggtggttgtgttgataaaaagtaagcaatacgtaaaataccataatataagttaatataagtatatatgagttaattcatccagttaattcatccagttaattcagcagcttggagaagagttcattatgattattgtttggctcaacttgaattcataacagactgccaagtattgcaaaaataagcatgctacaaaataaaaytgattattttcttaatcagatgagctgtattgtcactattttcttcaatggttcttcttctttctttctttctttctttcttttttttttttttttttagacaatacagttgtactggtgtccttsagattgcagacacctttttacatagaaaagtgtgttgcataaatgaagtaactttagtcacttggagtcaggcaaaatcttgcagtgtcgtagatctaaaagagtggaaataatgccacttagacctaagttgtggttgagtcaaacgatagacaaagcacagaaaagttaaaa

SEQ ID NO: 95575 - DNA, 600 bp, Chicken  19866894617925_3
gtaaaataccataatataagttaatataagtatatatgagttaattcatccagttaattcatccagttaattcagcagcttggagaagagttcattatgattattgtttggctcaacttgaattcataacagactgccaagtattgcaaaaataagcatgctacaaaataaaaytgattattttcttaatcagatgagctgtattgtcactattttcttcaatggttcttcttctttctttctttctttctttcttttttttttttttttttagacaatacagttgtactggtgtccttsagattgcagacacctttttacatagaaaagtgtgttgcataaatgaagtaactttagtcacttggagtcaggcaaaatcttgcagtgtcgtagatctaaaagagtggaaataatgccacttagacctaagttgtggttgagtcaaacgatagacaaagcacagaaaagttaaaagtaaatagatggaggaagacagcatatataagctgcaatggggcttatcttccatcattagggagcatatggtatgtaatattagaactcagatgagtttttcatgcaagatggtacttatgacaa

SEQ ID NO: 95576 - DNA, 600 bp, Chicken  19866894617941_1
acctatagttaataaaggaaaaaagcttcttttcccatcccccaaatatcctttgcaaaccttccctccaagaattctcaaatactaaaaatttaaatgtgatagttgttaaatatttcatcctacacctttttgttctgcatggacaatttccatatgcgtgaattaaaacattgtattgaatgtattatgaagagctctgtttcaagaacattagaatttgaatttaattttttattatgcgttacattgcttcactggaattcaggaagagtttggctggtacctgatgcaatgacwttcatgagtctgttatgatgaatagaaatcatatactaagcggtgagaagtataggtctgtcctacctgaagagagtggacggcttaaactagagtttttactaggcagtatgtcacagtgagaaaatataagtcaacattcagctgaacaaaatagtatttcaatttgggggatagattgttttattttgtatttgttattgttgtttttgttgttttaaagtggtatatctccacacagaaagtttaagaacaagtattgcctatgtgacatccatctacaagaggggtcaaaaggaa

SEQ ID NO: 95577 - DNA, 594 bp, Chicken  19866894617941_2
agtataggtctgtcctacctgaagagagtggacggcttaaactagagtttttactaggcagtatgtcacagtgagaaaatataagtcaacattcagctgaacaaaatagtatttcaatttgggggatagattgttttattttgtatttgttattgttgtttttgttgttttaaagtggtatatctccacacagaaagtttaagaacaagtattgcctatgtgacatccatctacaagaggggtcaaaaggaagatctggggaactacaagcatgtcagcctgacctcagtagcaggaagrgttatggarctgtgtgacataggctggggatgtagtcaacccaaactttagtaaagctttgactctgtctcccacagaattctcctggataagctagcagccaaagacttacagaagtgtagtcttctctggataaaggctgtctggatggccaagcccagaaagtggtggtgaatggggttaaatccagctggcatctggtcatgagtggtgttccgcaatggtcactattggggcctgtctgggttaatatatttacttatgatctgaactggggaattgactgtgccctca

SEQ ID NO: 95578 - DNA, 585 bp, Chicken  19866894617941_3
ctgtcctacctgaagagagtggacggcttaaactagagtttttactaggcagtatgtcacagtgagaaaatataagtcaacattcagctgaacaaaatagtatttcaatttgggggatagattgttttattttgtatttgttattgttgtttttgttgttttaaagtggtatatctccacacagaaagtttaagaacaagtattgcctatgtgacatccatctacaagaggggtcaaaaggaagatctggggaactacaagcatgtcagcctgacctcagtagcaggaagrgttatggarctgtgtgacataggctggggatgtagtcaacccaaactttagtaaagctttgactctgtctcccacagaattctcctggataagctagcagccaaagacttacagaagtgtagtcttctctggataaaggctgtctggatggccaagcccagaaagtggtggtgaatggggttaaatccagctggcatctggtcatgagtggtgttccgcaatggtcactattggggcctgtctgggttaatatatttacttatgatctgaactggggaattgactgtgccctca

SEQ ID NO: 95579 - DNA, 599 bp, Chicken  19866894617950_1
  misc_feature (1)..(81): n is any nucleotide
nnnnnnnnnnnnnnnnnnnnnnnnnnnnnnnnnnnnnnnnnnnnnnnnnnnnnnnnnnnnnnnnnnnnnnnnnnnnnnnnnaaaacttcccatttggaggtagtcattccacccaggacacctctaggtaacaactgtttgccatgtaactctcttttaatccctatgcaactgggctttcttttcagaccccttgtatcaaagaagtacagagaagtgtctgtaaatgtttatttttaatagtagcacaatcctgcacaaattccagaatagagtaacttggcagtctgttacatctcmaaatattatttattttcttacattaaaaaaaaaagaataaagtaccacttgacattcatattttttttatcatcttgacattatgaaacccaaaggaaagactagtaattccctttttgtactgccagcattgatctgcctttgatttccacattgctgtatctaaatgtgcaagagctcttcagagagaccagataacaaaatgtggggcatgcagagtttgttcttcactatttctttggaaagtaaagccaaaatggggagtrtcacacttcctaataagacactctgttttcaag

SEQ ID NO: 95580 - DNA, 600 bp, Chicken  19866894617950_2
agaatagagtaacttggcagtctgttacatctcmaaatattatttattttcttacattaaaaaaaaaagaataaagtaccacttgacattcatattttttttatcatcttgacattatgaaacccaaaggaaagactagtaattccctttttgtactgccagcattgatctgcctttgatttccacattgctgtatctaaatgtgcaagagctcttcagagagaccagataacaaaatgtggggcatgcagagtttgttcttcactatttctttggaaagtaaagccaaaatggggagtrtcacacttcctaataagacactctgttttcaaggcatgttcacgtagaattagatcagactctttaaactaaaataaaattaaaaaatgatagtaagagggaagcattctctgtagtttaatcccacttaaacacagcacctgaaatctatccaagtgcaccatgagcagagtgctcaatatatacagaatgtatataaagtcagcaaaacacacaattgcagtgttttgattgagaaaaaagcaagtttgactttttgacagaggaaacattgcttcttatccagatacatcaatctgg

SEQ ID NO: 95581 - DNA, 600 bp, Chicken  19866894617959_1
agaataaaagcttgtagctttcattctagttcttgcaaagtgacctttgaattcaccatgtaggagaaactgtatgttgtggatttttttttgtccactttgctgcagtgctgctgtcactattgtgaaatgtgtgttcagacctttttctttcaggcctgcatgtcagtcccacagtgaataattgcctgcatatggtagcatgggaagaagacatgacttaaacatttgcaaggaacattctggtttgcagagcttcagcaaatagctactttatgtgtgttttttcaaaccagcctrtgagtttgttgtcttcagacattgtaacctttaagctagtaaatagaaattactgggtaatgtgaagatatcatatggtattttcaagtgctattcaagagcattgtatgcattcaagagtaatggacaatttgttcttgtaattagaggaactgggtactccagttaccacctaccttttcagtacatgcctcactaggaattggatctcaatttgtctctgccaaattttgtttcattccctgtgaaaccaacttagttgtgtgctagaggtaatgccactctcatctgcatgacagt

SEQ ID NO: 95582 - DNA, 600 bp, Chicken  19866894617967_1
gtattgttgctcaaaacagttctgtaacagctgtgcagtacatctatccacaaacaaatgaccattcttacaacatggacctttaaaacatggaagcagctcattaaatggtgagtgctgagctctagttcctatatggtaacataccgtcactaatgcttcatcttctgctcttggcaaatggtcaagaaggaaaatacacccagcagaactttgtgcagtgcgcttctgaaaacagttcactgctataaagaacaagttttctctgtaatgttcaccatgtctcatgacttttccacrctgcttgatgtaagtttcctttgagttgatataatttatacaaagtgcttgctgaagacccccaaacctggaagagttaagtgtgtcatatgttacgtgttgtagcactttctcttttgtacttaaaatatcaattaaaaatattcagacatttacactgatgtctggtttgggatgtatttttagaatgttggaccacacaatcctcaaactacatgcacattaatactttttaagttaataaaccacaatgattatagaagtcatttaggctcttgcttcaatagtattaagcacaga

SEQ ID NO: 95583 - DNA, 600 bp, Chicken  19866894617967_2
ttcctttgagttgatataatttatacaaagtgcttgctgaagacccccaaacctggaagagttaagtgtgtcatatgttacgtgttgtagcactttctcttttgtacttaaaatatcaattaaaaatattcagacatttacactgatgtctggtttgggatgtatttttagaatgttggaccacacaatcctcaaactacatgcacattaatactttttaagttaataaaccacaatgattatagaagtcatttaggctcttgcttcaatagtattaagcacagagtttagcaaatgcaraaaagcatttagcaaataaggcaaccacaatacaggttttctactgaggagcctgtgggaaaaaatgtttattttatatgaaaacatacagaatacaaacaaaacaggagctgttggtttatgctagttcaataattaatcaaaattcaacactgcgtgtacctacacttaagatttccaagtgtttaacttcctatcaaaataaatatatgaggtctaataaggtctaaaaagataccaagttcttagctcctcctttgcatgtagttgatttgaagaggtacaaggcatgaaaacaga

SEQ ID NO: 95584 - DNA, 510 bp, Chicken  19866894617980_1
gatggggtgaacctctgctatgttcttggtgctacatccctaggttggcaatgtaataataaaaaaagtagtgttggacagattagaccataatattgtggggcatcccatggatttacgatctctttttccaatttcagggaggagaacattgctattatcagggaaaaattagaggaaacccagtatcatttgttgccttgtcaacatgccatggactacagtaagtctgctgttttgtttttactgaatttcacttagtcttttaaacaaagctgtttaaagaaaaataagtgccayttattcattaattggtttgcaaccactgttattatctcaataacctttacataaaacagatttaatttgaaccttctaagtgttggtttttttcaggacccactgccaaaacacccaagttttctctttttcttttttttctttttaaactaaagacatatgatagcagctttgaccagatattgttttaagatagtttacagtagagat

SEQ ID NO: 95585 - DNA, 600 bp, Chicken  19866894617984_1
aaataattagtttgaggaatactttttcaccctttgtgtagagttagtactgtggatttgtgatctacagtaattcttattcattttgaatatagtaatttgttcctgtcagcagaggggctggtttgttgttttaaattgctgacttttgtttttgctggcatactccccaatacaaattgaacttctaacaaaattctatttgtatgacatttcagtctggataggtgctctgtgttgcctaacagtacagtttggggtccccaagataaaagctgactgaatgccaagattttagcygagcttgtatgtgcagataacgaaggtaatccatgttcctcgggtctgtaaatcaaacaaagaagaaatatgcatgcacaccattctctttgagatagtggactggtagttcattcttaataacaatagggaatatctaacccctgagaacaatggagagctgacacaagggatactcctatgtgaaattagaaagattagaagattcttagaaaaatacaggatgcttctctccacccttaacagttaatgcctaaataaattattcagtggatccagtttgtggcaatatctactctt

SEQ ID NO: 95586 - DNA, 600 bp, Chicken  19866894617992_1
gcttaaaccagacggctcaagggtttatggaatgttataaaatacagtgcctatacacagaacatttacatacactgttttgcagtgatgtaccaaaagcaggcataaactagagataagtctcaaaaggagtttggaaaggaaatatttcataactatgctaaaaaaatctttattttggtaagttatatcagattagagaagtctcgttaattgttactttccctagttaattcccattatgcacaaaaacaattataggtttactgtgtcagaggctgaacaaaatttgtctgctcyatactattataatttwaaaaacttttctctattaaaaataaaaacrttttttatagaacataggtaggataaggcatccagttgacaaatacatttgtgacttgtaccatccaattctctctatgctttacacaaacacacaagagtaaaattttcctcatacgtttaatctgaggacacccaaaatagatagatcactcaacataaatctacaagttccgttgtactcagaagacacccatttatcacaattcagctagaccacagtgctacatacttaaaagaaaagacagacttcag

SEQ ID NO: 95587 - DNA, 600 bp, Chicken  19866894617992_2
tcaagggtttatggaatgttataaaatacagtgcctatacacagaacatttacatacactgttttgcagtgatgtaccaaaagcaggcataaactagagataagtctcaaaaggagtttggaaaggaaatatttcataactatgctaaaaaaatctttattttggtaagttatatcagattagagaagtctcgttaattgttactttccctagttaattcccattatgcacaaaaacaattataggtttactgtgtcagaggctgaacaaaatttgtctgctcyatactattataatttwaaaaacttttctctattaaaaataaaaacrttttttatagaacataggtaggataaggcatccagttgacaaatacatttgtgacttgtaccatccaattctctctatgctttacacaaacacacaagagtaaaattttcctcatacgtttaatctgaggacacccaaaatagatagatcactcaacataaatctacaagttccgttgtactcagaagacacccatttatcacaattcagctagaccacagtgctacatacttaaaagaaaagacagacttcagagtttttattttcatc

SEQ ID NO: 95588 - DNA, 600 bp, Chicken  19866894617992_3
gtgcctatacacagaacatttacatacactgttttgcagtgatgtaccaaaagcaggcataaactagagataagtctcaaaaggagtttggaaaggaaatatttcataactatgctaaaaaaatctttattttggtaagttatatcagattagagaagtctcgttaattgttactttccctagttaattcccattatgcacaaaaacaattataggtttactgtgtcagaggctgaacaaaatttgtctgctcyatactattataatttwaaaaacttttctctattaaaaataaaaacrttttttatagaacataggtaggataaggcatccagttgacaaatacatttgtgacttgtaccatccaattctctctatgctttacacaaacacacaagagtaaaattttcctcatacgtttaatctgaggacacccaaaatagatagatcactcaacataaatctacaagttccgttgtactcagaagacacccatttatcacaattcagctagaccacagtgctacatacttaaaagaaaagacagacttcagagtttttattttcatcaaaaatttgattttatagaaatgtacarat

SEQ ID NO: 95589 - DNA, 600 bp, Chicken  19866894617992_4
crttttttatagaacataggtaggataaggcatccagttgacaaatacatttgtgacttgtaccatccaattctctctatgctttacacaaacacacaagagtaaaattttcctcatacgtttaatctgaggacacccaaaatagatagatcactcaacataaatctacaagttccgttgtactcagaagacacccatttatcacaattcagctagaccacagtgctacatacttaaaagaaaagacagacttcagagtttttattttcatcaaaaatttgattttatagaaatgtacarattacctgattgaacatgtagagaactcgggtcacatcgtttgcatattggcacctagaatagtcctcttctgcccagtatcctcccctgtcacatctgcgccaagctcttctctcatcttgcgagttgccaggatatatcccactgccagcagagtaacgtgtacacagcaggtacgctgtgatgcctgccaatgttctaggccacctggggagtcaaaagcaaaaaaaataaaaaaataagaaaaaaaaaaaagagagaaagaaatttacatgacaagtaaataaaaggattaagcac

SEQ ID NO: 95590 - DNA, 599 bp, Chicken  19866894617995_1
  misc_feature (1)..(163): n is any nucleotide
nnnnnnnnnnnnnnnnnnnnnnnnnnnnnnnnnnnnnnnnnnnnnnnnnnnnnnnnnnnnnnnnnnnnnnnnnnnnnnnnnnnnnnnnnnnnnnnnnnnnnnnnnnnnnnnnnnnnnnnnnnnnnnnnnnnnnnnnnnnnnnnnnnnnnnnnnnnnnnnnnnncctgtccttggtcatcaacgtaactgccatgcatcatgtttgacagcagcaccacttggatgagaaacgctgcggtgatgcttgcaatggttgcagccatcacagtcagtgtgaagaggtagaggaagaaatacttygcattgaaggcaccgatgcagttgttgacccacacacagtggtgatcaaaacgatgcacacagatgtcacaaaaacctgatcaaaagcgagcaacaaggcaagtcaatcattcgattttaagtgatcgattcaatctttacacagtttaggacagctttgcattcaaggaaaaaaatgagaattgcggtcaygatttaggtgaccgtgtaaattaaaggaaattcaactactcaccaccaaataaacagcatgcaaaacaaagatgtgtacctcatttcttaattgtatttaccgagac

SEQ ID NO: 95591 - DNA, 600 bp, Chicken  19866894617995_2
tgcatcatgtttgacagcagcaccacttggatgagaaacgctgcggtgatgcttgcaatggttgcagccatcacagtcagtgtgaagaggtagaggaagaaatacttygcattgaaggcaccgatgcagttgttgacccacacacagtggtgatcaaaacgatgcacacagatgtcacaaaaacctgatcaaaagcgagcaacaaggcaagtcaatcattcgattttaagtgatcgattcaatctttacacagtttaggacagctttgcattcaaggaaaaaaatgagaattgcggtcaygatttaggtgaccgtgtaaattaaaggaaattcaactactcaccaccaaataaacagcatgcaaaacaaagatgtgtacctcatttcttaattgtatttaccgagactrcagctcaaacattctgctttctctggcaatacagcctaacacagcacgtggaagggagggactgtaactccctgctttatttgaagtgatgatgacagcagcaaattctgccagggaaacgagaaattctgaactcagctcttgtcaggcaatcatttttatttcacctttagatattcaacagcttgtct

SEQ ID NO: 95592 - DNA, 600 bp, Chicken  19866894617995_3
cattgaaggcaccgatgcagttgttgacccacacacagtggtgatcaaaacgatgcacacagatgtcacaaaaacctgatcaaaagcgagcaacaaggcaagtcaatcattcgattttaagtgatcgattcaatctttacacagtttaggacagctttgcattcaaggaaaaaaatgagaattgcggtcaygatttaggtgaccgtgtaaattaaaggaaattcaactactcaccaccaaataaacagcatgcaaaacaaagatgtgtacctcatttcttaattgtatttaccgagactrcagctcaaacattctgctttctctggcaatacagcctaacacagcacgtggaagggagggactgtaactccctgctttatttgaagtgatgatgacagcagcaaattctgccagggaaacgagaaattctgaactcagctcttgtcaggcaatcatttttatttcacctttagatattcaacagcttgtctggccctgacccaaagagataccttcagaactggtcatttctgtgagaacaaatacagcacgaatgggcaaagggcggctgtgatgtggaactctgctaaaactgaacga

SEQ ID NO: 95593 - DNA, 600 bp, Chicken  19866894617996_1
tgaccttactacttttatggggttgcttttctgaagaaattttaaagaacgtatttgaagaaaaagctcagtgagcacagcaagacgagcaaaaagtgggggaaagtcatggaagcaacagtgctgaaagttaagagtaagacgtcacctttatatatgcagaaacagctgaaataaggtaatcactcactgcagccaaagaagaggatttctccccaccccctgctcccaccccctttcttgtgtcagatccgatactgcacaccttcctctgtctccccaccacaacacaagaccackgcttagtgagagcagaaggctgcagccagcagcacacccggtgcagacagaaaggctggtgatgtgagtgagtacacagcccgttgtgattggaagaggggtggcaggagcaccccaaccacaagattactggagagtgaaaggcggggatattttgcagagaaagtggaaatgatccactaaatggccacacgtgctagcatatggctagtactttaaaccaattttccttgtcacttcctgaatttgagctttttcaagtttattttaagcatcaaaagtaacaacagcaagattcat

SEQ ID NO: 95594 - DNA, 600 bp, Chicken  19866894617999_1
ctggaacgagctgttgtctttgccggcatccgggaaggaagggaagggtctgcttttctcgcgtgcaagcgtgcgggcttgcatttgggattgcgtttgggtgtatatccgtgcatagaggtgctgggtggaaggtgaagtgctgtgacgcagtggcacagggaaaggaaacagaagggaaacacaacacggaatcaacataaacacttccaagggcacgtgttcccagcattgtcctgcaagggaaatggcctcttttcccttcccattttgtctccagtgctgatgcatcatccacgytcagctccaaagcaaagcatgctgcagccctgctgcacctcacacacagcgcacagccccagcagtacctgtatcacaatacagcatgccttattgagcagcaccgcagctctgccttcccgagagccttggctgtgtgtctgcatggcagggaaggcaggacaccgagtcccagaccagtgcccagaatagctgtgtgacagagcagtgcaggaggtgctgtgcggtcagccatgagggcaaagccacagagaggatttcttctgaactggaaattcagcgacacgctctgctttggat

SEQ ID NO: 95595 - DNA, 600 bp, Chicken  19866894617999_2
atgagggcaaagccacagagaggatttcttctgaactggaaattcagcgacacgctctgctttggatttgaatcgggattggatcttgctgtaatttccaagtggaaataagccttttgcatccggtggtcggacaaatgggcttctcttcgtgcataagctctgctgggagctgctctatggatcaaggggtgagaagtcaagaggcacgtggggctgtctcatttggaggcccttgagtcaacagcatgagagtgtaaatgtgactctgcagcactgctggaacgtgaagcagtgccmctgcaggcagtgtgaagggrcagcttgccatcagcagggtgacccccctgtcccctacaggaattgctggggtcagacagcagcatctccccctgtctacgtgtatctctggagctgctccaatgcatcacctgcagcaaattcagggtgaatcgagttcaggcrtggggatctgcagagcgagccgagcataatggctgcagtgagcatacagcagcctgtgtgtggggccagcatgctgctgtggcaggatatgggatggtgcaccaagcaggtgcctgctttattatagaatgggaa

SEQ ID NO: 95596 - DNA, 600 bp, Chicken  19866894617999_3
aggatttcttctgaactggaaattcagcgacacgctctgctttggatttgaatcgggattggatcttgctgtaatttccaagtggaaataagccttttgcatccggtggtcggacaaatgggcttctcttcgtgcataagctctgctgggagctgctctatggatcaaggggtgagaagtcaagaggcacgtggggctgtctcatttggaggcccttgagtcaacagcatgagagtgtaaatgtgactctgcagcactgctggaacgtgaagcagtgccmctgcaggcagtgtgaagggrcagcttgccatcagcagggtgacccccctgtcccctacaggaattgctggggtcagacagcagcatctccccctgtctacgtgtatctctggagctgctccaatgcatcacctgcagcaaattcagggtgaatcgagttcaggcrtggggatctgcagagcgagccgagcataatggctgcagtgagcatacagcagcctgtgtgtggggccagcatgctgctgtggcaggatatgggatggtgcaccaagcaggtgcctgctttattatagaatgggaaacactgctgctgcctgacgc

SEQ ID NO: 95597 - DNA, 600 bp, Chicken  19866894617999_4
ctgggagctgctctatggatcaaggggtgagaagtcaagaggcacgtggggctgtctcatttggaggcccttgagtcaacagcatgagagtgtaaatgtgactctgcagcactgctggaacgtgaagcagtgccmctgcaggcagtgtgaagggrcagcttgccatcagcagggtgacccccctgtcccctacaggaattgctggggtcagacagcagcatctccccctgtctacgtgtatctctggagctgctccaatgcatcacctgcagcaaattcagggtgaatcgagttcaggcrtggggatctgcagagcgagccgagcataatggctgcagtgagcatacagcagcctgtgtgtggggccagcatgctgctgtggcaggatatgggatggtgcaccaagcaggtgcctgctttattatagaatgggaaacactgctgctgcctgacgctgcttccccatttgcacctgaggcacatccagcaaaaactatcctctccccctcctttccaagcaggctgtgtgcttccacgctgtcacagctgagctgttgctctgtgagcagggccctctgcccccctccaccccagcaacag

SEQ ID NO: 95598 - DNA, 600 bp, Chicken  19866894618000_1
ttttaatttttcttgttttcttttgtttttcattcattttttgaaacaacgcttactgaaatttatgttgacaagctgcagacagagtgatggagtgctccttctctgatctgcagttagaagtcatttgcatccctccacctcactttgtttttttccacaaagggaagtttctttaactcagttatcaatcaacgaaagctctgaaaggctatttcatacaacaatttgttaaagtgacgacagtggtatcaaccacacagctcctcagtaatagcccgaaaagatccatgtcaccgkgttattaatagtataaggaaaggaatttaaagccattagcactgactgcctttgcttccaaagtgaattttctttttcctctgaaattagcactttgtttcttattcacctgctgttccaaaaaccgacagtgaaacaataaccatctgcgttatcaaaactcatttctgccaatgatcactattatcttaatacaaaatttcaaaacaagacatcaaacaacagaaaccaaaccaaaccaaacatttaaagtaaaaaaaaaaaaaaaagaaaagaaaaaaaagtccactcagtgactgg

SEQ ID NO: 95599 - DNA, 458 bp, Chicken  19866894618011_1
tctccgttttgatatatagcgaatgtcataaatatatatgaaaaagaagcatccagcctcgtatagttcacctgtgtttcatgcacagttttttatttctacatctgttaaaagatgacagtaaaattggcttgattcagcttgaatttcaacctgtcttaaacacaacaatctctcaagcatgctcacttgctcatttgagaagactcacactggagcttgttgctgtgggtgatgaaagaggcaggaatctaaacatgcagtggcaaaaatatattgtgagtttctgaagcatctcaytctgagtcagagattggattatttttctacgtacactatcataaatagatgaggcattgataccaaacacagtaggagagggggagagtccaatatcaattgctctggggtgtcaagggattcagtggcactgagctgaattcatgcctaaatgggga

SEQ ID NO: 95600 - DNA, 473 bp, Chicken  19866894618012_1
gcataattaaaccaagctttcagtgcatgctccagtgcctaagtactctggaaaaaaatatgctatcagatcagttttacaaaatgagccttaagattctgtgtgttccttagttataaaatcacatgaatggatgatgctatgaagatagattacataagggtttcaaaatatttttatgaaatatttttatgaaaattccttttttaatgaaaaaggaaatacaaaattaccaaatattgtaacatattataaccaaaatgtgttaaggtatcctattaagacatggagatataactygttcattgastgtagcaccagaatggtcaaaataatgtacattcatgaagtgtgtggaaagaaattttgttttgcgtggttttcaggagtggggtactgctggcatttggttctggaattaaatctccacaaagaatattggtttggatcagacaacatttctcctctcctct

SEQ ID NO: 95601 - DNA, 463 bp, Chicken  19866894618012_2
accaagctttcagtgcatgctccagtgcctaagtactctggaaaaaaatatgctatcagatcagttttacaaaatgagccttaagattctgtgtgttccttagttataaaatcacatgaatggatgatgctatgaagatagattacataagggtttcaaaatatttttatgaaatatttttatgaaaattccttttttaatgaaaaaggaaatacaaaattaccaaatattgtaacatattataaccaaaatgtgttaaggtatcctattaagacatggagatataactygttcattgastgtagcaccagaatggtcaaaataatgtacattcatgaagtgtgtggaaagaaattttgttttgcgtggttttcaggagtggggtactgctggcatttggttctggaattaaatctccacaaagaatattggtttggatcagacaacatttctcctctcctct

SEQ ID NO: 95602 - DNA, 600 bp, Chicken  19866894618022_1
gctttaaaagaaatattatgaagaaaaggaatagaagtacatttgtcaaaacatttcaagattgggtcccactttgtctcttatgagagaagtcctgggctgacactggtatcacgggggctgcattagtttgcttaccctcagttatgacaccagtgatagttcaaaataaaataaggatagtccaagttaaagcagtatttctaactggctgtaaacagtaaaattagtaaactctgaatgatttctgagaagcagcctttgaccaattggctcacagtatttccaagtgctgctccwagatatttttaattggcttttccactatgcttcgaagtgttaagctatctgttacaatttattagtagcttttaaaagtcctcctcatatataggcaaagcttacaacataagataatatttcttatgcaccatttactctgctgtctacatagcagtctttatggcagtcagactatttatgaagtactttggtcaaaatggtttaagcttatattccaaagttttgagttaaagacttgaaaactgattgtaacagcaactgttctctccagttcttagactgcagacatgatgatct

SEQ ID NO: 95603 - DNA, 600 bp, Chicken  19866894618028_1
aaaatgcaacagtggaggaaaacactcatagaatcatagaatggcctgggttgaaaaggaccacaatgatcatcaagtttcaacccccctgacatgggcagggtcaccaaccaccagacaggatgcccagagccacattcagcctggccttgaatgcctccagggatggggcatccaatacctccttgggtaacctgttccagtgtgtcatcaccctttttagtgaaaaacttcctaacatccaacctacacctcccctgtcccactttaaaaccattcccccttgtcctatcactatcyaccctcgtaaacagtyrttccctctcctgtttatatgctgccttcaaatactggaaagccacagtgaggtctccccaaagccttctcttctcyaagctaaacaagcccagttcccacaacttttcttcacaggagaggtgctccagcctaagatcatcttagtggtcctcctctggagtcattccaagggttctacaactttcctgtgctcagggccccaagcctggatgcactactccagatggggcctcacaggagctgagctattcactagtagcataggtgcatacatttgcaact

SEQ ID NO: 95604 - DNA, 600 bp, Chicken  19866894618028_2
ggaaaacactcatagaatcatagaatggcctgggttgaaaaggaccacaatgatcatcaagtttcaacccccctgacatgggcagggtcaccaaccaccagacaggatgcccagagccacattcagcctggccttgaatgcctccagggatggggcatccaatacctccttgggtaacctgttccagtgtgtcatcaccctttttagtgaaaaacttcctaacatccaacctacacctcccctgtcccactttaaaaccattcccccttgtcctatcactatcyaccctcgtaaacagtyrttccctctcctgtttatatgctgccttcaaatactggaaagccacagtgaggtctccccaaagccttctcttctcyaagctaaacaagcccagttcccacaacttttcttcacaggagaggtgctccagcctaagatcatcttagtggtcctcctctggagtcattccaagggttctacaactttcctgtgctcagggccccaagcctggatgcactactccagatggggcctcacaggagctgagctattcactagtagcataggtgcatacatttgcaactaatttaatgcacattt

SEQ ID NO: 95605 - DNA, 600 bp, Chicken  19866894618028_3
gaaaacactcatagaatcatagaatggcctgggttgaaaaggaccacaatgatcatcaagtttcaacccccctgacatgggcagggtcaccaaccaccagacaggatgcccagagccacattcagcctggccttgaatgcctccagggatggggcatccaatacctccttgggtaacctgttccagtgtgtcatcaccctttttagtgaaaaacttcctaacatccaacctacacctcccctgtcccactttaaaaccattcccccttgtcctatcactatcyaccctcgtaaacagtyrttccctctcctgtttatatgctgccttcaaatactggaaagccacagtgaggtctccccaaagccttctcttctcyaagctaaacaagcccagttcccacaacttttcttcacaggagaggtgctccagcctaagatcatcttagtggtcctcctctggagtcattccaagggttctacaactttcctgtgctcagggccccaagcctggatgcactactccagatggggcctcacaggagctgagctattcactagtagcataggtgcatacatttgcaactaatttaatgcacatttt

SEQ ID NO: 95606 - DNA, 589 bp, Chicken  19866894618028_4
atgggcagggtcaccaaccaccagacaggatgcccagagccacattcagcctggccttgaatgcctccagggatggggcatccaatacctccttgggtaacctgttccagtgtgtcatcaccctttttagtgaaaaacttcctaacatccaacctacacctcccctgtcccactttaaaaccattcccccttgtcctatcactatcyaccctcgtaaacagtyrttccctctcctgtttatatgctgccttcaaatactggaaagccacagtgaggtctccccaaagccttctcttctcyaagctaaacaagcccagttcccacaacttttcttcacaggagaggtgctccagcctaagatcatcttagtggtcctcctctggagtcattccaagggttctacaactttcctgtgctcagggccccaagcctggatgcactactccagatggggcctcacaggagctgagctattcactagtagcataggtgcatacatttgcaactaatttaatgcacattttaaactaatgttaatatatatatacatatatatacattttaagccagaagtaacactaacacattg

SEQ ID NO: 95607 - DNA, 600 bp, Chicken  19866894618030_1
aactcagatagcagtgtgtgcgtgtgtccaatggccttgtttaaccactcacatagacagacattagatggcatttcatcttcagcaaataccacacaatcttgtgcatcaaatgtgtatgaactggaacactgaatgcaaaagtgaaaaaacaaatatctaataatcttaaatgattcctttatagttttcctagacattagcttatcagttaatgaaaagcaagtaaaaatgagactgacctttactgaattattctcactttaaatacacttaggagaaatttaatttagagatacragagttaagagcttgatttgggtggaactgtggaccacgtcaagcagtgcataaggcacacaacagcagccatggaacatcagtcttaactacttaacagcacaccactacagcatttacgaagacctgagctcagttctcaaacgtatcacaaagcaaatttgcatatttctctgcagttcctttccatttcatttggtcaccttggtaggagtaggataggatagaacaatctctctaaattgcatacgcctcaccttgcagcaacagcagaagggtataatggcctccagaaactac

SEQ ID NO: 95608 - DNA, 600 bp, Chicken  19866894618030_2
acaatctctctaaattgcatacgcctcaccttgcagcaacagcagaagggtataatggcctccagaaactactacaagtgaatgactgttcccttgagtatttaccacctaaataagaaagaccacagaaaattctatctagtattagattatagaagtataaactaattttacaggtaaggagcttgcaaacagcaattctaaactgccccagtgctcagccagcagatgttcacctatcaaattaaaacaagtttcactctcacatcacaaagggttagagaggagggtccatactgscaaccaagcaatgcaggagtttcttcccactagtggacagcaacagtcagcttttcagtaggcttcaatgagataaatgagctgatatgacagctggctgctgcccagagttgcttcatcttccaaacctcattgcgctttcactttttccttactgctactacagagagcatctgctgttctgggcagttcaaatcagaaaccatgagctgggagcaagaaaggaagaagggatatggaaaggggagagacttctgtcatggcaataagatcacaaaaccctaagaaaagtggaatcta

SEQ ID NO: 95609 - DNA, 600 bp, Chicken  19866894618036_1
ttattttccccttcttattcctgaggtgatgataggagagaaaagcctaattttggctcgtaaagctgccagatttcaggatgattttgttgtgggtgttttcaagagagagcagaggagactgcatagagaggacaagaagtttgtgtcggtgtacttggcatgtaagaaggggttagaaagctgacgggtattctctatcccatggtacagttcaaacatgtttgcactgtacagacacaacactgacatttcttattcattttatttatggggcactgatggagatttgtaatcccygatcccgctctcattttcatgcagctccacagtagctccattgatccagtggatgagcattggttaaaagcaaaaagcagaagtgaaatcatacatctttttggtttaactatgagaaaacatgttgtacatttgaactctragataagtataaatgaagtggagaaggctgttgaaaaattcagacgatttggttgctaaatgcaaagtggatgtggatgaagatggtaacctttacttgaatggcatcagaggttaccagggtgaatatttatgggaaagatgtgcattatttacacg

SEQ ID NO: 95610 - DNA, 600 bp, Chicken  19866894618036_2
tttgtgtcggtgtacttggcatgtaagaaggggttagaaagctgacgggtattctctatcccatggtacagttcaaacatgtttgcactgtacagacacaacactgacatttcttattcattttatttatggggcactgatggagatttgtaatcccygatcccgctctcattttcatgcagctccacagtagctccattgatccagtggatgagcattggttaaaagcaaaaagcagaagtgaaatcatacatctttttggtttaactatgagaaaacatgttgtacatttgaactctragataagtataaatgaagtggagaaggctgttgaaaaattcagacgatttggttgctaaatgcaaagtggatgtggatgaagatggtaacctttacttgaatggcatcagaggttaccagggtgaatatttatgggaaagatgtgcattatttacacgttccaaggcagcagttcagtggtgtcctttccctggattcgttcagtscaggcggtrgcagcgatgcagtgcgtggtgctgcaggattgtgttcaatgtgcagaggctgcagggcagggaggggagcagcgttgtgtttgag

SEQ ID NO: 95611 - DNA, 600 bp, Chicken  19866894618036_3
gtggatgagcattggttaaaagcaaaaagcagaagtgaaatcatacatctttttggtttaactatgagaaaacatgttgtacatttgaactctragataagtataaatgaagtggagaaggctgttgaaaaattcagacgatttggttgctaaatgcaaagtggatgtggatgaagatggtaacctttacttgaatggcatcagaggttaccagggtgaatatttatgggaaagatgtgcattatttacacgttccaaggcagcagttcagtggtgtcctttccctggattcgttcagtscaggcggtrgcagcgatgcagtgcgtggtgctgcaggattgtgttcaatgtgcagaggctgcagggcagggaggggagcagcgttgtgtttgagtttgtatttgaatcaggtgcaaaggccagcgaaagcacacggctctgagtaaagaacattcagagccccataaatcattgatctaatgttgttatgctacaatggcaaattatgctggttttgtctctgcagttagacagtgcaacagatggcaaagatttgcacagcaagtaacgttcttggcaaagcaaattttatgaatttat

SEQ ID NO: 95612 - DNA, 600 bp, Chicken  19866894618036_4
cattggttaaaagcaaaaagcagaagtgaaatcatacatctttttggtttaactatgagaaaacatgttgtacatttgaactctragataagtataaatgaagtggagaaggctgttgaaaaattcagacgatttggttgctaaatgcaaagtggatgtggatgaagatggtaacctttacttgaatggcatcagaggttaccagggtgaatatttatgggaaagatgtgcattatttacacgttccaaggcagcagttcagtggtgtcctttccctggattcgttcagtscaggcggtrgcagcgatgcagtgcgtggtgctgcaggattgtgttcaatgtgcagaggctgcagggcagggaggggagcagcgttgtgtttgagtttgtatttgaatcaggtgcaaaggccagcgaaagcacacggctctgagtaaagaacattcagagccccataaatcattgatctaatgttgttatgctacaatggcaaattatgctggttttgtctctgcagttagacagtgcaacagatggcaaagatttgcacagcaagtaacgttcttggcaaagcaaattttatgaatttatagttgaaga

SEQ ID NO: 95613 - DNA, 600 bp, Chicken  19866894618043_1
cagtcagtgtcacatcaggcaagaaatgcacaaattctcagtcaaatctaggaagctagccatgtgcacaggtgatttaagcactagggaacagacaagccacctgctgaaatacacatggtaacaaattgaagaaagctttcccccgctttgtgggggggagaaatctttgaggctgcttctatttcttatttttttgtaggaaatatgatttgcctatggtttcagtgtgatttttcctcttttaggaaagaagattgaaggtttttttatgcttttcctatatttcagcatttgaaytgaaagcaggccaggagagactgtcaaactggtagatccacctgcccccatccccatcctatccagactccactgagcaatttctgctgtggaaatgtctttcctcagctcataaagatgcattagatacaacgcactgtcattacaaaagcaccaaactacttcagatgacattagactgaacaaaacatctcagaatgatatgcaagagtttccctctacagccacctgcaaattccttgagtttaacaatgctgcatttcagaccgaaatattaagtaaggaaaacaacaataacaa

SEQ ID NO: 95614 - DNA, 600 bp, Chicken  19866894618047_1
cctaacagaaagacaaactacagcaggtctgtacgggaagcaggcagaaagggagaaaaaaatgtacagatacacagactgcagtgcccattaaaaactgagaatggaattatacttggagcaaaatctataccccactgaaggcagagacaaaaaattcattacatctatggcacctccttcatttggcaggattcatggacagttgcttcacattctttgggcatacctgtgtctttgattaggtaggaccaacatgttgctctgttgcagatggacaatactgctgatgttacctargaatggtgatgttacctattgatggtgttacctaggaaagatcagagccagtgtgtagtataaattcctccccagactcaatttatgkttattattgccataaataaccttttaaatgtcttcaaaaagtgggcccagacattggtcattcttaaaagcttccctgacgttatgtcccaaatgaaaaccttgatgctgtggtaattaacatttagcagccatgtgttttgcaagcaatactgacaacctgctaatagtgctacctattttctcctctggagaaaacacactgtgaatttg

SEQ ID NO: 95615 - DNA, 600 bp, Chicken  19866894618047_2
cattaaaaactgagaatggaattatacttggagcaaaatctataccccactgaaggcagagacaaaaaattcattacatctatggcacctccttcatttggcaggattcatggacagttgcttcacattctttgggcatacctgtgtctttgattaggtaggaccaacatgttgctctgttgcagatggacaatactgctgatgttacctargaatggtgatgttacctattgatggtgttacctaggaaagatcagagccagtgtgtagtataaattcctccccagactcaatttatgkttattattgccataaataaccttttaaatgtcttcaaaaagtgggcccagacattggtcattcttaaaagcttccctgacgttatgtcccaaatgaaaaccttgatgctgtggtaattaacatttagcagccatgtgttttgcaagcaatactgacaacctgctaatagtgctacctattttctcctctggagaaaacacactgtgaatttgtctctcaaaatgacctctgaacaagctctgccttcagggccacagtactaagctgtaagtttgtatcccrtcaggtcttcaacaaggt

SEQ ID NO: 95616 - DNA, 560 bp, Chicken  19866894618047_3
cccagactcaatttatgkttattattgccataaataaccttttaaatgtcttcaaaaagtgggcccagacattggtcattcttaaaagcttccctgacgttatgtcccaaatgaaaaccttgatgctgtggtaattaacatttagcagccatgtgttttgcaagcaatactgacaacctgctaatagtgctacctattttctcctctggagaaaacacactgtgaatttgtctctcaaaatgacctctgaacaagctctgccttcagggccacagtactaagctgtaagtttgtatcccrtcaggtcttcaacaaggtggaatggggaaaacccactgatcttttcttcataaacaacagtcttgggatttgctcaagaaatgaaaactgtacatgtatcatccatagtcttgtaagaccatcatattgatgctttctttgccagcatgatggtttttgcagtctatttgcactgacactgcagaaacactaaaggaaaggaagaaaactgcttgtggaccacatccagccatagctgacatttcaggatcataagaatt

SEQ ID NO: 95617 - DNA, 600 bp, Chicken  19866894618054_1
ggactgtttggacaatgctctcagagataggggcttgaattttgagttgctcctgtgtggagccaggagctggattcatggtccttatgggtctactccaacttgaattattctaactctacattttcagctacagtaattttgcaagaaaacattttatctttgcttatgcaacctgcaattgctcaagtgactttgaagaatagaaatcaaaattaaagattaactccctagaggcacacagttaaaaaaaaaacacaagaaacataaaaaaatctgttccatgcagctgtattaggrgctgcttctgaacatgttcacacattctgtagacagacagatctatttgaagtattaatttcgaagttgatttgaaaatgtccctccaatggagtatgcagtaacatccttggcaagtgaagcaataagaagttgtcaatataaaaaaaaatatactggacttagattgctttttttcttcatgaattttcaaaacctcttctgctggatatctaccagcttgctctgtttctatgcttcacacagtacaccaactgctctgactccctctgcattcacaagaagtcaaacttctgagta

SEQ ID NO: 95618 - DNA, 600 bp, Chicken  19866894618058_1
acatctgcacgtcctcagtatttcccatgctgaagggtagaaaaagatgttttagcaaaagcgtgctctatgctttgaaagtaggacaagttatgtcctactttcctagcgtggccagcatgagcagggaggtaatcaccccccctgtactcagcactggtgaggctgcacctcgagtattgtgttcagttttgagccccttaagaaagacattgaggcccaagaacatgtccagggaagggcaacaaaactgatgaggggtctggagcacaaatcttatgaggggtgactgagggagcygggatttttcagcctggagaagaggctcagaggagacctcattgtactctacaacttcctgaaggaaggttgtgatgagaaggggtttggcctcttctcccaggcaacaaacaggaggaaaaggccacaagttgtaccagaggaggtttaatttagacataaggaaaaactttttctctcagagtggtcaggtgctggaatggcctgcccagggaggtggaggagttgctgtccctggcagtgttcaagaggcgtctggaagagaagctatgagatatggtttagtggcttgtggtagca

SEQ ID NO: 95619 - DNA, 599 bp, Chicken  19866894618063_1
  misc_feature (1)..(136): n is any nucleotide
nnnnnnnnnnnnnnnnnnnnnnnnnnnnnnnnnnnnnnnnnnnnnnnnnnnnnnnnnnnnnnnnnnnnnnnnnnnnnnnnnnnnnnnnnnnnnnnnnnnnnnnnnnnnnnnnnnnnnnnnnnnnnnnnnnnnnnnntgcaagaatatgtcttgacacagttgctttttaagttctgacttggttcatcaaggcaatgctatgtattaatagagggtttttttcctccttcttccatgcttatatttgcattgcagaattgaaatccaaagtaagggctgatgtaagcacttactgggcargaaggttctcagctgatcaggaagatttgcatcactgtgtgcagtgcagtatgctgcttgcttactagactagaactccatctagatattaatttgatttaggcagggacaaaggctgctttcagaaatgtttttttacattgtgcaactgctttctttttagagatttctggggtaggaatctcttgatagaagctgctgatggaatttgaaagtattaacttctgcgccttgactcgagcgctgcggttttcctttaggcagagctatctgctggagtcccttgtcttgaagatcct

SEQ ID NO: 95620 - DNA, 600 bp, Chicken  19866894618066_1
tgtcccaggagctgctggagagggtgagtaattccatcctggccgcggccccgggggggccccacctgcgcctgacccctctctctgctccccagatccgtgctaaggaggcccggcggctgcaggcgctgatgacgcgggagatggggcaggaggagcggctggccatgctgggccgactgccggccatggcccgcatcctgcgtggggtcttcgtgacagagaagaagccggcgctgcccatggagctggcgtgtgcccgtatggccgacagcttccccacacagatggcagcaggtrgggggtgcggggctgcaggcggcgcggtggtggggctcgccgggctgggagctgagctgttgtctgcacgcatccctgcaggtgagatggagaagcacctgcggctcctggctgagctgctgcccgactgggtgacgatccacgctctccgcaccgacacctacatgaagctggacaagaacgtggacctcggcctcgtcaccgagaggctggagaaggcagccaaggaggcagaagccctctgagccctgctggagtccgggcttcccctatgcagttctctattcttcaagcgtagtg

SEQ ID NO: 95621 - DNA, 600 bp, Chicken  19866894618079_1
taaatagctgctgaggcagatgcctatctattcaagtctcttccagccagactgctgctgtaatcaaaaagctggtgatgtggcaccatctcaactagaagcagtacaaccagcttctccgtccttccgtgcagcagtggtttgtgtcatgaactctcaagtaaagccatgaattttcctgggttcaattttacttgtaccctgatatcagcagtgtttcagtaaatatcttgtcactatattttatctctgttattcttggcagccaattccaattatcttctctcaacccaagctagmctttcatgctaacttattacatgcatttacacagtgtaaatcagtgtagtgtctgaactggagatgatacatgtcttaaaataataaaggcatgccatatttcttgtgttaacacataggttaagtctgcccacttgttgcctgggaaatgtgaatacaagaggccacaaaaagctacagctgaggctagttgagcacttgcccaagaaacaactgactaagaacgctgatgcgaaggctgcaatacggtaattagctgtttttaaagtcaaattcatttcagaaagggactgtgagttt

SEQ ID NO: 95622 - DNA, 599 bp, Chicken  19866894618097_1
  misc_feature (1)..(83): n is any nucleotide
nnnnnnnnnnnnnnnnnnnnnnnnnnnnnnnnnnnnnnnnnnnnnnnnnnnnnnnnnnnnnnnnnnnnnnnnnnnnnnnnnnngctatgcctgagctgcagtgtcgaattagacctgtggaccattctctgggccttaagctgagggatgaaaactggctgtgcctagcctagagactacataacacttggctgtcagtctcctctggttcccaaatggactatctaagtacatatacaagactatggaaaattatttttctgtgtgcctattaatcataagtgtctgatagaatgtgakgactgagttgcatccagtagaatgaagctgtcacagtgtgactctgaaggtgtatgtgacatatcctggagttgtactggagcatgaagggtctrctagggtagtgctggagggatgggtaaggtggagaaaggcagatgtgctgcatgttccacatccttggagacactcaaggtcaggctggatggggctctgagcaacctgatctagctgtagggtccctgttcattgcaggrgagttggactagatgacctttaagggttycttccaactcaaaagattctatgattctgtgaat

SEQ ID NO: 95623 - DNA, 600 bp, Chicken  19866894618097_2
ctgcagtgtcgaattagacctgtggaccattctctgggccttaagctgagggatgaaaactggctgtgcctagcctagagactacataacacttggctgtcagtctcctctggttcccaaatggactatctaagtacatatacaagactatggaaaattatttttctgtgtgcctattaatcataagtgtctgatagaatgtgakgactgagttgcatccagtagaatgaagctgtcacagtgtgactctgaaggtgtatgtgacatatcctggagttgtactggagcatgaagggtctrctagggtagtgctggagggatgggtaaggtggagaaaggcagatgtgctgcatgttccacatccttggagacactcaaggtcaggctggatggggctctgagcaacctgatctagctgtagggtccctgttcattgcaggrgagttggactagatgacctttaagggttycttccaactcaaaagattctatgattctgtgaatgacacaggactgacttgcattctttggcctttctcactcaatacaaatgagcatgagtgttgtacgacttcctgctgaatagcatttgctcactga

SEQ ID NO: 95624 - DNA, 600 bp, Chicken  19866894618097_3
acaagactatggaaaattatttttctgtgtgcctattaatcataagtgtctgatagaatgtgakgactgagttgcatccagtagaatgaagctgtcacagtgtgactctgaaggtgtatgtgacatatcctggagttgtactggagcatgaagggtctrctagggtagtgctggagggatgggtaaggtggagaaaggcagatgtgctgcatgttccacatccttggagacactcaaggtcaggctggatggggctctgagcaacctgatctagctgtagggtccctgttcattgcaggrgagttggactagatgacctttaagggttycttccaactcaaaagattctatgattctgtgaatgacacaggactgacttgcattctttggcctttctcactcaatacaaatgagcatgagtgttgtacgacttcctgctgaatagcatttgctcactgaccagtcatgcttgactgtctcctggaaaatcctgagtggcacaaaggatttcctttggagttccttggaatcataggggcatgtactaaaaatagcacttcacagactcaaaacgaggataatgtggatcttctctgagta

SEQ ID NO: 95625 - DNA, 600 bp, Chicken  19866894618097_4
tgcctattaatcataagtgtctgatagaatgtgakgactgagttgcatccagtagaatgaagctgtcacagtgtgactctgaaggtgtatgtgacatatcctggagttgtactggagcatgaagggtctrctagggtagtgctggagggatgggtaaggtggagaaaggcagatgtgctgcatgttccacatccttggagacactcaaggtcaggctggatggggctctgagcaacctgatctagctgtagggtccctgttcattgcaggrgagttggactagatgacctttaagggttycttccaactcaaaagattctatgattctgtgaatgacacaggactgacttgcattctttggcctttctcactcaatacaaatgagcatgagtgttgtacgacttcctgctgaatagcatttgctcactgaccagtcatgcttgactgtctcctggaaaatcctgagtggcacaaaggatttcctttggagttccttggaatcataggggcatgtactaaaaatagcacttcacagactcaaaacgaggataatgtggatcttctctgagtacgtggttacacagcaaaacttcttgccac

SEQ ID NO: 95626 - DNA, 600 bp, Chicken  19866894618100_1
agcccattatcaccatgcccactaaccacgtccctcagtgccacatctccacatttcttcagccagtttcagtgcctcaccattctttctgagaagaaatttttcccaggctagaaatttctcaaggctagaaatcccattattcccatcgactgctgcaatgaaacttatatgctcccccaaaaaatcattgaaccccttccagaggagcagatgggttgttgtaaagcaaaaaaaaaaagaaaaaagaaaaacaaaacaaaacaaacaaccaaaagcttctgccacccagatccctcytctgtattcttgacattggctaatctatgtgtaaattcactctgtgcaggttaactcctgcgctagggctgagctcttttcaatgcgccacgtaaatgctgctcaccgtgtatttacattgaacatgttgccccactgtacattaacatttaaaacaaaatcgccagccccatcacaagcatcactccgagggaaggcagcacagcgtagacatcgtgtaagtaatttgttcaacattggtgataataagctacacggagcaataagaacataaacacggggctttgtgtgagcgtgtgt

SEQ ID NO: 95627 - DNA, 600 bp, Chicken  19866894618107_1
caatgacctgaaaggggaagaagtcctgccacacagggctggggagaaccgctggatggaatatccccattggcatgctagttaagaagggctttatcaatcccagagactgtaatattcctcaaggtaagaagatgtaccatatagtaactgtccaattataaactttcattagggaagtacagctttgatactgcaaagctctatattaagttaatcagtttgtttgtgaggggttgttgcctttttaatgtcactttttgaaattgtaagcttcctgattaggctagtagaggggcyrtgctgagaacattacctctaatgtacctttctaattgtacctttcacaaagycactgcttaattyrggttggaggggtcatctagagcaacctgctgctcaaagcakgtccagttagatctcattgtccagggccacgtccaaccaaattctgagtaactctgaggatggagtttccacaacctctctgggccyttgccccagtttttgtctatttttggtataaataatttctttccttatatctaattagaattttccatattgtaacttctattagccttcagtgacacaaaagtg

SEQ ID NO: 95628 - DNA, 600 bp, Chicken  19866894618107_10
atggagtttccacaacctctctgggccyttgccccagtttttgtctatttttggtataaataatttctttccttatatctaattagaattttccatattgtaacttctattagccttcagtgacacaaaagtgtgctgccaactcttggtcaatgtgttgcccaccagggcctccaggtccttttttttgttgttgttkttttaacaagctgcttttcagccttgcagcctttcaygacttattcctacttaaagcgggattttacattcacctctgttgaacttggagattcccatcarttgtttttgtagccagcccatgtcctcctcagcagcagccatgscctgcagtgtatcaaactgyaaatgtttattctgattttcagaaatgtaggtgaagtgtcttcttaaaatttaatcaacttggtttatcatctattgctgaaaacccagctttcacacctgcccatctctgtccttgcttgaggatgttgactccagtcagtgtcactgataggacagtyactgagactatcgcagtctacacagatgtatgtcctctccaggtggcacttccagctctgggatgtcattgcagta

SEQ ID NO: 95629 - DNA, 600 bp, Chicken  19866894618107_11
ctatttttggtataaataatttctttccttatatctaattagaattttccatattgtaacttctattagccttcagtgacacaaaagtgtgctgccaactcttggtcaatgtgttgcccaccagggcctccaggtccttttttttgttgttgttkttttaacaagctgcttttcagccttgcagcctttcaygacttattcctacttaaagcgggattttacattcacctctgttgaacttggagattcccatcarttgtttttgtagccagcccatgtcctcctcagcagcagccatgscctgcagtgtatcaaactgyaaatgtttattctgattttcagaaatgtaggtgaagtgtcttcttaaaatttaatcaacttggtttatcatctattgctgaaaacccagctttcacacctgcccatctctgtccttgcttgaggatgttgactccagtcagtgtcactgataggacagtyactgagactatcgcagtctacacagatgtatgtcctctccaggtggcacttccagctctgggatgtcattgcagtaaatgatgaattattgtccggaattttattgcgtttattttcaaa

SEQ ID NO: 95630 - DNA, 600 bp, Chicken  19866894618107_12
ttctttccttatatctaattagaattttccatattgtaacttctattagccttcagtgacacaaaagtgtgctgccaactcttggtcaatgtgttgcccaccagggcctccaggtccttttttttgttgttgttkttttaacaagctgcttttcagccttgcagcctttcaygacttattcctacttaaagcgggattttacattcacctctgttgaacttggagattcccatcarttgtttttgtagccagcccatgtcctcctcagcagcagccatgscctgcagtgtatcaaactgyaaatgtttattctgattttcagaaatgtaggtgaagtgtcttcttaaaatttaatcaacttggtttatcatctattgctgaaaacccagctttcacacctgcccatctctgtccttgcttgaggatgttgactccagtcagtgtcactgataggacagtyactgagactatcgcagtctacacagatgtatgtcctctccaggtggcacttccagctctgggatgtcattgcagtaaatgatgaattattgtccggaattttattgcgtttattttcaaacattatttagtactggagca

SEQ ID NO: 95631 - DNA, 600 bp, Chicken  19866894618107_13
gcagcctttcaygacttattcctacttaaagcgggattttacattcacctctgttgaacttggagattcccatcarttgtttttgtagccagcccatgtcctcctcagcagcagccatgscctgcagtgtatcaaactgyaaatgtttattctgattttcagaaatgtaggtgaagtgtcttcttaaaatttaatcaacttggtttatcatctattgctgaaaacccagctttcacacctgcccatctctgtccttgcttgaggatgttgactccagtcagtgtcactgataggacagtyactgagactatcgcagtctacacagatgtatgtcctctccaggtggcacttccagctctgggatgtcattgcagtaaatgatgaattattgtccggaattttattgcgtttattttcaaacattatttagtactggagcaatacagtaatcatgcagtaattataatcagttaagtggtactttgaaaatatagtaagttttagtttgtgaattccaggaaggcagctataattcatgtttctagtgtcctgctggaactggtgttggtataacctcatgacagtgtaactaccctttct

SEQ ID NO: 95632 - DNA, 600 bp, Chicken  19866894618107_14
tgacagccatagcaaaagagaggtgtgtctgtgtgtacatgcatgtcaaagcctcttgccagcttcctggcccacagccacacagatgagaagcagccaaatccccatttctgtttacagagcgacggccactcacctagtgaggagcacatgggttgtcatctgtctgcagccttgctctaattgagtgtgacagcctgccactctgctcaggtcatccataaagagcttaagcagggaaataggcaaagagtagtcactacttggtggctatgagtgtgtgctgagcatggtaggctrggagcagggaactggggctgggtctgctctgtcctcaccatttgtggtggtatgcaaraataggtttcataacagcacaaacagcttatgttcaaatatcatatccttttcaaaacaagatttggtaaaggtatagaaggcaaaaatagtgtaaaattgaacaaatacttcatataacagtgaacatcaacatctggrgatattaactgttttaaagccccaaatctgtgggtagatatggaagctttttcttggccttcatctgtgaaggcagtggtgttcttcagtgtagagggctgt

SEQ ID NO: 95633 - DNA, 600 bp, Chicken  19866894618107_15
ccagcttcctggcccacagccacacagatgagaagcagccaaatccccatttctgtttacagagcgacggccactcacctagtgaggagcacatgggttgtcatctgtctgcagccttgctctaattgagtgtgacagcctgccactctgctcaggtcatccataaagagcttaagcagggaaataggcaaagagtagtcactacttggtggctatgagtgtgtgctgagcatggtaggctrggagcagggaactggggctgggtctgctctgtcctcaccatttgtggtggtatgcaaraataggtttcataacagcacaaacagcttatgttcaaatatcatatccttttcaaaacaagatttggtaaaggtatagaaggcaaaaatagtgtaaaattgaacaaatacttcatataacagtgaacatcaacatctggrgatattaactgttttaaagccccaaatctgtgggtagatatggaagctttttcttggccttcatctgtgaaggcagtggtgttcttcagtgtagagggctgtaaagcagcatctgtgcatgcagtaagatcactccaacctggaaaaaagccccacagaa

SEQ ID NO: 95634 - DNA, 600 bp, Chicken  19866894618107_16
tgccactctgctcaggtcatccataaagagcttaagcagggaaataggcaaagagtagtcactacttggtggctatgagtgtgtgctgagcatggtaggctrggagcagggaactggggctgggtctgctctgtcctcaccatttgtggtggtatgcaaraataggtttcataacagcacaaacagcttatgttcaaatatcatatccttttcaaaacaagatttggtaaaggtatagaaggcaaaaatagtgtaaaattgaacaaatacttcatataacagtgaacatcaacatctggrgatattaactgttttaaagccccaaatctgtgggtagatatggaagctttttcttggccttcatctgtgaaggcagtggtgttcttcagtgtagagggctgtaaagcagcatctgtgcatgcagtaagatcactccaacctggaaaaaagccccacagaagtggttgggtatgcacayacatgcagaacctggtaaacacttatgcactcaaggagtctgaatggcatatacttcggatgtgttttaaaaggtgtgaaagctgttgttaccaaatggggagtagagcactgagtatcatt

SEQ ID NO: 95635 - DNA, 600 bp, Chicken  19866894618107_17
acaaacagcttatgttcaaatatcatatccttttcaaaacaagatttggtaaaggtatagaaggcaaaaatagtgtaaaattgaacaaatacttcatataacagtgaacatcaacatctggrgatattaactgttttaaagccccaaatctgtgggtagatatggaagctttttcttggccttcatctgtgaaggcagtggtgttcttcagtgtagagggctgtaaagcagcatctgtgcatgcagtaagatcactccaacctggaaaaaagccccacagaagtggttgggtatgcacayacatgcagaacctggtaaacacttatgcactcaaggagtctgaatggcatatacttcggatgtgttttaaaaggtgtgaaagctgttgttaccaaatggggagtagagcactgagtatcatttatcttctgtttctttgcttatctaatactgacctttctctgccctttctcccatcgttattaatagctatttcctgctgtattactctcttgaaattcttaaagtatttttaaactttgcagtgatgttggtttttctctcattccaagatgcttcatttcttggtttgctttttct

SEQ ID NO: 95636 - DNA, 600 bp, Chicken  19866894618107_2
aatgacctgaaaggggaagaagtcctgccacacagggctggggagaaccgctggatggaatatccccattggcatgctagttaagaagggctttatcaatcccagagactgtaatattcctcaaggtaagaagatgtaccatatagtaactgtccaattataaactttcattagggaagtacagctttgatactgcaaagctctatattaagttaatcagtttgtttgtgaggggttgttgcctttttaatgtcactttttgaaattgtaagcttcctgattaggctagtagaggggcyrtgctgagaacattacctctaatgtacctttctaattgtacctttcacaaagycactgcttaattyrggttggaggggtcatctagagcaacctgctgctcaaagcakgtccagttagatctcattgtccagggccacgtccaaccaaattctgagtaactctgaggatggagtttccacaacctctctgggccyttgccccagtttttgtctatttttggtataaataatttctttccttatatctaattagaattttccatattgtaacttctattagccttcagtgacacaaaagtgt

SEQ ID NO: 95637 - DNA, 600 bp, Chicken  19866894618107_3
ggatggaatatccccattggcatgctagttaagaagggctttatcaatcccagagactgtaatattcctcaaggtaagaagatgtaccatatagtaactgtccaattataaactttcattagggaagtacagctttgatactgcaaagctctatattaagttaatcagtttgtttgtgaggggttgttgcctttttaatgtcactttttgaaattgtaagcttcctgattaggctagtagaggggcyrtgctgagaacattacctctaatgtacctttctaattgtacctttcacaaagycactgcttaattyrggttggaggggtcatctagagcaacctgctgctcaaagcakgtccagttagatctcattgtccagggccacgtccaaccaaattctgagtaactctgaggatggagtttccacaacctctctgggccyttgccccagtttttgtctatttttggtataaataatttctttccttatatctaattagaattttccatattgtaacttctattagccttcagtgacacaaaagtgtgctgccaactcttggtcaatgtgttgcccaccagggcctccaggtccttttt

SEQ ID NO: 95638 - DNA, 600 bp, Chicken  19866894618107_4
ccattggcatgctagttaagaagggctttatcaatcccagagactgtaatattcctcaaggtaagaagatgtaccatatagtaactgtccaattataaactttcattagggaagtacagctttgatactgcaaagctctatattaagttaatcagtttgtttgtgaggggttgttgcctttttaatgtcactttttgaaattgtaagcttcctgattaggctagtagaggggcyrtgctgagaacattacctctaatgtacctttctaattgtacctttcacaaagycactgcttaattyrggttggaggggtcatctagagcaacctgctgctcaaagcakgtccagttagatctcattgtccagggccacgtccaaccaaattctgagtaactctgaggatggagtttccacaacctctctgggccyttgccccagtttttgtctatttttggtataaataatttctttccttatatctaattagaattttccatattgtaacttctattagccttcagtgacacaaaagtgtgctgccaactcttggtcaatgtgttgcccaccagggcctccaggtccttttttttgttgttgttk

SEQ ID NO: 95639 - DNA, 600 bp, Chicken  19866894618107_5
cattggcatgctagttaagaagggctttatcaatcccagagactgtaatattcctcaaggtaagaagatgtaccatatagtaactgtccaattataaactttcattagggaagtacagctttgatactgcaaagctctatattaagttaatcagtttgtttgtgaggggttgttgcctttttaatgtcactttttgaaattgtaagcttcctgattaggctagtagaggggcyrtgctgagaacattacctctaatgtacctttctaattgtacctttcacaaagycactgcttaattyrggttggaggggtcatctagagcaacctgctgctcaaagcakgtccagttagatctcattgtccagggccacgtccaaccaaattctgagtaactctgaggatggagtttccacaacctctctgggccyttgccccagtttttgtctatttttggtataaataatttctttccttatatctaattagaattttccatattgtaacttctattagccttcagtgacacaaaagtgtgctgccaactcttggtcaatgtgttgcccaccagggcctccaggtccttttttttgttgttgttkt

SEQ ID NO: 95640 - DNA, 600 bp, Chicken  19866894618107_6
actgtaatattcctcaaggtaagaagatgtaccatatagtaactgtccaattataaactttcattagggaagtacagctttgatactgcaaagctctatattaagttaatcagtttgtttgtgaggggttgttgcctttttaatgtcactttttgaaattgtaagcttcctgattaggctagtagaggggcyrtgctgagaacattacctctaatgtacctttctaattgtacctttcacaaagycactgcttaattyrggttggaggggtcatctagagcaacctgctgctcaaagcakgtccagttagatctcattgtccagggccacgtccaaccaaattctgagtaactctgaggatggagtttccacaacctctctgggccyttgccccagtttttgtctatttttggtataaataatttctttccttatatctaattagaattttccatattgtaacttctattagccttcagtgacacaaaagtgtgctgccaactcttggtcaatgtgttgcccaccagggcctccaggtccttttttttgttgttgttkttttaacaagctgcttttcagccttgcagcctttcaygactt

SEQ ID NO: 95641 - DNA, 600 bp, Chicken  19866894618107_7
gcaaagctctatattaagttaatcagtttgtttgtgaggggttgttgcctttttaatgtcactttttgaaattgtaagcttcctgattaggctagtagaggggcyrtgctgagaacattacctctaatgtacctttctaattgtacctttcacaaagycactgcttaattyrggttggaggggtcatctagagcaacctgctgctcaaagcakgtccagttagatctcattgtccagggccacgtccaaccaaattctgagtaactctgaggatggagtttccacaacctctctgggccyttgccccagtttttgtctatttttggtataaataatttctttccttatatctaattagaattttccatattgtaacttctattagccttcagtgacacaaaagtgtgctgccaactcttggtcaatgtgttgcccaccagggcctccaggtccttttttttgttgttgttkttttaacaagctgcttttcagccttgcagcctttcaygacttattcctacttaaagcgggattttacattcacctctgttgaacttggagattcccatcarttgtttttgtagccagcccatgtcctcc

SEQ ID NO: 95642 - DNA, 600 bp, Chicken  19866894618107_8
rggttggaggggtcatctagagcaacctgctgctcaaagcakgtccagttagatctcattgtccagggccacgtccaaccaaattctgagtaactctgaggatggagtttccacaacctctctgggccyttgccccagtttttgtctatttttggtataaataatttctttccttatatctaattagaattttccatattgtaacttctattagccttcagtgacacaaaagtgtgctgccaactcttggtcaatgtgttgcccaccagggcctccaggtccttttttttgttgttgttkttttaacaagctgcttttcagccttgcagcctttcaygacttattcctacttaaagcgggattttacattcacctctgttgaacttggagattcccatcarttgtttttgtagccagcccatgtcctcctcagcagcagccatgscctgcagtgtatcaaactgyaaatgtttattctgattttcagaaatgtaggtgaagtgtcttcttaaaatttaatcaacttggtttatcatctattgctgaaaacccagctttcacacctgcccatctctgtccttgcttgaggatgttgactcc

SEQ ID NO: 95643 - DNA, 600 bp, Chicken  19866894618107_9
agcakgtccagttagatctcattgtccagggccacgtccaaccaaattctgagtaactctgaggatggagtttccacaacctctctgggccyttgccccagtttttgtctatttttggtataaataatttctttccttatatctaattagaattttccatattgtaacttctattagccttcagtgacacaaaagtgtgctgccaactcttggtcaatgtgttgcccaccagggcctccaggtccttttttttgttgttgttkttttaacaagctgcttttcagccttgcagcctttcaygacttattcctacttaaagcgggattttacattcacctctgttgaacttggagattcccatcarttgtttttgtagccagcccatgtcctcctcagcagcagccatgscctgcagtgtatcaaactgyaaatgtttattctgattttcagaaatgtaggtgaagtgtcttcttaaaatttaatcaacttggtttatcatctattgctgaaaacccagctttcacacctgcccatctctgtccttgcttgaggatgttgactccagtcagtgtcactgataggacagtyactgagactatc

SEQ ID NO: 95644 - DNA, 600 bp, Chicken  19866894618121_1
gcacagggagacaaaacaaatacgcaaacaccaaacataaacaggaggtttgtggcaacgattgtgtagcacaaaaccaatgttaaaactcattatacagcagctatactaaaggaagtggatggagaggagctttcattattgtggatgtattttctttgttctggaaagactcataaatgcaaggtcagactgcctcatccaccagaacaaaatccagcctgttgtaggcagctctaggtatcagataagactgcagactgatagcagcgctatctgagcttctatttacatgctgtrtgtgtttgtcagaggtcagggtggttcctcgcatccagagcctgcatgacacagaggcagtgcggtcgacccgttcgatcgcccgctgccgtgagccaagcgtgccctgcttgtgcgagctgacagccctgaggctggaggccaaacgatgtcagccacccacgagctgttctctatagtcacggggttgcagtttatttggagcaaagaactcgcttgccttccataagctctgtcccacgtcctgtgcccttaaccgtgattatagttgaaactgccgtaatgtagagcagcccattt

SEQ ID NO: 95645 - DNA, 600 bp, Chicken  19866894618132_1
gtatcctgcactgcatcaagagaagtgtgatcagcacatcgaggaagatgattctgcccctctattctgctttcaagagaccccacctggagtactgcatccagttctgaagctgccaacacaagaaggacatgaagttgttggagcaggtccagaggagggccacaaagatgatcagagggctagagcacctcctcttcaaggaggggctgagagagctaaggttcttcagtctagacaagagaaggctccgtggagaccttacagcagccttctagtacctgaagggggcatgtggcratagaaggggaaatggttttaaactggaataggatagatttatagcagcacttcactgtaagggtagtgagacagtggaacaggtcgcccagagaggctgtggatgcaccctccctagaagcattgaaggccaggttggatgggactttgagcaacctggtctagaggggaggtgtcccttgcctatagcagagggattgaaacagccatctcaaagataccttccaacccaaaccagtctatgatttttagtacagaaacattctttgcaagttcacatataccctcaaaattaatagc

SEQ ID NO: 95646 - DNA, 599 bp, Chicken  19866894618149_1
  misc_feature (1)..(151): n is any nucleotide
nnnnnnnnnnnnnnnnnnnnnnnnnnnnnnnnnnnnnnnnnnnnnnnnnnnnnnnnnnnnnnnnnnnnnnnnnnnnnnnnnnnnnnnnnnnnnnnnnnnnnnnnnnnnnnnnnnnnnnnnnnnnnnnnnnnnnnnnnnnnnnnnnnnnnnnctttagggtagtcctgacagagaaaggatgccaaaccagaatttaaaataaagattcatgcagtttatttctgctctttatgccactgatgtgcatcctgctttaagtatgtcaatttatattctttctaacaactgaaataagacacyctcycaacccttttctcagcctcacagctttcatcaggaccagtattacayrggaggaagatagcagaagtgtgttttgttcctgtttccctatgctccggctccatttttctttccattctgaaaccaacgtatcacagcacttcattttcaggtggccaaacacatgttgtgaccacaagaaaggtgaactgctcaaaatgtacacattcatttatatgtttatgataacacttattaaaaaagtgtccacctaaagsccacctcttgctcaccttgagatattaccagcaagacta

SEQ ID NO: 95647 - DNA, 599 bp, Chicken  19866894618149_2
  misc_feature (1)..(147): n is any nucleotide
nnnnnnnnnnnnnnnnnnnnnnnnnnnnnnnnnnnnnnnnnnnnnnnnnnnnnnnnnnnnnnnnnnnnnnnnnnnnnnnnnnnnnnnnnnnnnnnnnnnnnnnnnnnnnnnnnnnnnnnnnnnnnnnnnnnnnnnnnnnnnnnnnnnctttagggtagtcctgacagagaaaggatgccaaaccagaatttaaaataaagattcatgcagtttatttctgctctttatgccactgatgtgcatcctgctttaagtatgtcaatttatattctttctaacaactgaaataagacacyctcycaacccttttctcagcctcacagctttcatcaggaccagtattacayrggaggaagatagcagaagtgtgttttgttcctgtttccctatgctccggctccatttttctttccattctgaaaccaacgtatcacagcacttcattttcaggtggccaaacacatgttgtgaccacaagaaaggtgaactgctcaaaatgtacacattcatttatatgtttatgataacacttattaaaaaagtgtccacctaaagsccacctcttgctcaccttgagatattaccagcaagactatctg

SEQ ID NO: 95648 - DNA, 599 bp, Chicken  19866894618149_3
  misc_feature (1)..(100): n is any nucleotide
nnnnnnnnnnnnnnnnnnnnnnnnnnnnnnnnnnnnnnnnnnnnnnnnnnnnnnnnnnnnnnnnnnnnnnnnnnnnnnnnnnnnnnnnnnnnnnnnnnnnctttagggtagtcctgacagagaaaggatgccaaaccagaatttaaaataaagattcatgcagtttatttctgctctttatgccactgatgtgcatcctgctttaagtatgtcaatttatattctttctaacaactgaaataagacacyctcycaacccttttctcagcctcacagctttcatcaggaccagtattacayrggaggaagatagcagaagtgtgttttgttcctgtttccctatgctccggctccatttttctttccattctgaaaccaacgtatcacagcacttcattttcaggtggccaaacacatgttgtgaccacaagaaaggtgaactgctcaaaatgtacacattcatttatatgtttatgataacacttattaaaaaagtgtccacctaaagsccacctcttgctcaccttgagatattaccagcaagactatctgaygtactacagttaatgaacaaagttgctacaaaggtgactaattac

SEQ ID NO: 95649 - DNA, 599 bp, Chicken  19866894618149_4
  misc_feature (1)..(99): n is any nucleotide
nnnnnnnnnnnnnnnnnnnnnnnnnnnnnnnnnnnnnnnnnnnnnnnnnnnnnnnnnnnnnnnnnnnnnnnnnnnnnnnnnnnnnnnnnnnnnnnnnnnctttagggtagtcctgacagagaaaggatgccaaaccagaatttaaaataaagattcatgcagtttatttctgctctttatgccactgatgtgcatcctgctttaagtatgtcaatttatattctttctaacaactgaaataagacacyctcycaacccttttctcagcctcacagctttcatcaggaccagtattacayrggaggaagatagcagaagtgtgttttgttcctgtttccctatgctccggctccatttttctttccattctgaaaccaacgtatcacagcacttcattttcaggtggccaaacacatgttgtgaccacaagaaaggtgaactgctcaaaatgtacacattcatttatatgtttatgataacacttattaaaaaagtgtccacctaaagsccacctcttgctcaccttgagatattaccagcaagactatctgaygtactacagttaatgaacaaagttgctacaaaggtgactaattacc

SEQ ID NO: 95650 - DNA, 600 bp, Chicken  19866894618149_5
tgtcaatttatattctttctaacaactgaaataagacacyctcycaacccttttctcagcctcacagctttcatcaggaccagtattacayrggaggaagatagcagaagtgtgttttgttcctgtttccctatgctccggctccatttttctttccattctgaaaccaacgtatcacagcacttcattttcaggtggccaaacacatgttgtgaccacaagaaaggtgaactgctcaaaatgtacacattcatttatatgtttatgataacacttattaaaaaagtgtccacctaaagsccacctcttgctcaccttgagatattaccagcaagactatctgaygtactacagttaatgaacaaagttgctacaaaggtgactaattaccactttggttcacagtaacatttagatgtactgaatataggctaaaagatgtccaatttatatccattttatatgtagcttttagaaaaatattaaactacataatcacagataactgtccatgaaatacctgctataaatcacacatatgaggaaggaaaaaaatgccagttttcacacttttttttgttcagctgtattagagaaaca

SEQ ID NO: 95651 - DNA, 600 bp, Chicken  19866894618149_6
aacccttttctcagcctcacagctttcatcaggaccagtattacayrggaggaagatagcagaagtgtgttttgttcctgtttccctatgctccggctccatttttctttccattctgaaaccaacgtatcacagcacttcattttcaggtggccaaacacatgttgtgaccacaagaaaggtgaactgctcaaaatgtacacattcatttatatgtttatgataacacttattaaaaaagtgtccacctaaagsccacctcttgctcaccttgagatattaccagcaagactatctgaygtactacagttaatgaacaaagttgctacaaaggtgactaattaccactttggttcacagtaacatttagatgtactgaatataggctaaaagatgtccaatttatatccattttatatgtagcttttagaaaaatattaaactacataatcacagataactgtccatgaaatacctgctataaatcacacatatgaggaaggaaaaaaatgccagttttcacacttttttttgttcagctgtattagagaaacaattgattctatacaaccattcaaagtagaaaaccagatctgggaa

SEQ ID NO: 95652 - DNA, 599 bp, Chicken  19866894618164_1
  misc_feature (1)..(102): n is any nucleotide
nnnnnnnnnnnnnnnnnnnnnnnnnnnnnnnnnnnnnnnnnnnnnnnnnnnnnnnnnnnnnnnnnnnnnnnnnnnnnnnnnnnnnnnnnnnnnnnnnnnnnnctaacgaagaatttgatttcttcccttcagttaaccactgagatgtggggaagaagtgaaagaagagacggaattcttcttctattcccccagggggactatagcttgtcgtgtgctcccttaaaaataagctgtttgtcttttcagctgcggaaagaagtgtatcatagttgtatgaaacctaagttttctgtctarggactgcgtcctgcattggcaagagcaggctggagattacataaaatggcactgtatggagaaacaggtaggaggcccatttgcaaaaggccacacaggatggaagtaaggcgtgtcttagtgtctctatttctatccagcatacctttctgacggctctcactgctgyatggtggagctgtcatctgtctagmtttccaggggttaaagaaagctagcccatatttaaggcagcctcgtgccgaaccaacattttttaccctgctcagtacccatgctgcggctgaaggtcgctgcac

SEQ ID NO: 95653 - DNA, 600 bp, Chicken  19866894618164_2
acggaattcttcttctattcccccagggggactatagcttgtcgtgtgctcccttaaaaataagctgtttgtcttttcagctgcggaaagaagtgtatcatagttgtatgaaacctaagttttctgtctarggactgcgtcctgcattggcaagagcaggctggagattacataaaatggcactgtatggagaaacaggtaggaggcccatttgcaaaaggccacacaggatggaagtaaggcgtgtcttagtgtctctatttctatccagcatacctttctgacggctctcactgctgyatggtggagctgtcatctgtctagmtttccaggggttaaagaaagctagcccatatttaaggcagcctcgtgccgaaccaacattttttaccctgctcagtacccatgctgcggctgaaggtcgctgcactcagtaataatttttgactagaatagagctgacacacacagtttgtgctctgactcttcctgggtgttctgcattaacagctctcaggccagcattcagaagcgttgtgctccacagccctgctgtgcgtctccatcttctgtcacttcgggatcttaaccaccagattt

SEQ ID NO: 95654 - DNA, 600 bp, Chicken  19866894618164_3
gggggactatagcttgtcgtgtgctcccttaaaaataagctgtttgtcttttcagctgcggaaagaagtgtatcatagttgtatgaaacctaagttttctgtctarggactgcgtcctgcattggcaagagcaggctggagattacataaaatggcactgtatggagaaacaggtaggaggcccatttgcaaaaggccacacaggatggaagtaaggcgtgtcttagtgtctctatttctatccagcatacctttctgacggctctcactgctgyatggtggagctgtcatctgtctagmtttccaggggttaaagaaagctagcccatatttaaggcagcctcgtgccgaaccaacattttttaccctgctcagtacccatgctgcggctgaaggtcgctgcactcagtaataatttttgactagaatagagctgacacacacagtttgtgctctgactcttcctgggtgttctgcattaacagctctcaggccagcattcagaagcgttgtgctccacagccctgctgtgcgtctccatcttctgtcacttcgggatcttaaccaccagatttttgcatgaggacaaagagtggaaag

SEQ ID NO: 95655 - DNA, 600 bp, Chicken  19866894618164_4
gttgtgctccacagccctgctgtgcgtctccatcttctgtcacttcgggatcttaaccaccagatttttgcatgaggacaaagagtggaaagtttggcagcattgtggaatttggtagggaaaggaagcctgcattccttgcggttgtgtggtgacaaagcgtgctgtgaccacactgcagagacagacatgcacaagcattctgtgtcttgggtcccttcgttcacacttgcttcacagagcgggttcattatcctcatgttgcgagggtgcttaacatttagcttttcccttctgcaragggctggaattcctgtgaatggccaggagaggtgcaagggaaggactakatctgtatggggtgatgctgttgaaagcagcaagtttacatttatgctatragctgctggttgctatcactgatccctatttttttttcctcagggaagccctgaatgctaacagtgtgctaatgagtatgatatctgtctctaggccttttaggattagaggaatcacagcgttttacaaacaaaatcctccaagctgcacgtgcgtgctatccatcagtagggattgsagcaggatgcagcatctgaa

SEQ ID NO: 95656 - DNA, 600 bp, Chicken  19866894618164_5
tcttaaccaccagatttttgcatgaggacaaagagtggaaagtttggcagcattgtggaatttggtagggaaaggaagcctgcattccttgcggttgtgtggtgacaaagcgtgctgtgaccacactgcagagacagacatgcacaagcattctgtgtcttgggtcccttcgttcacacttgcttcacagagcgggttcattatcctcatgttgcgagggtgcttaacatttagcttttcccttctgcaragggctggaattcctgtgaatggccaggagaggtgcaagggaaggactakatctgtatggggtgatgctgttgaaagcagcaagtttacatttatgctatragctgctggttgctatcactgatccctatttttttttcctcagggaagccctgaatgctaacagtgtgctaatgagtatgatatctgtctctaggccttttaggattagaggaatcacagcgttttacaaacaaaatcctccaagctgcacgtgcgtgctatccatcagtagggattgsagcaggatgcagcatctgaactttctgacccgtgtgttaagccagcagagctgcaagtgttttgcaatca

SEQ ID NO: 95657 - DNA, 600 bp, Chicken  19866894618164_6
attgtggaatttggtagggaaaggaagcctgcattccttgcggttgtgtggtgacaaagcgtgctgtgaccacactgcagagacagacatgcacaagcattctgtgtcttgggtcccttcgttcacacttgcttcacagagcgggttcattatcctcatgttgcgagggtgcttaacatttagcttttcccttctgcaragggctggaattcctgtgaatggccaggagaggtgcaagggaaggactakatctgtatggggtgatgctgttgaaagcagcaagtttacatttatgctatragctgctggttgctatcactgatccctatttttttttcctcagggaagccctgaatgctaacagtgtgctaatgagtatgatatctgtctctaggccttttaggattagaggaatcacagcgttttacaaacaaaatcctccaagctgcacgtgcgtgctatccatcagtagggattgsagcaggatgcagcatctgaactttctgacccgtgtgttaagccagcagagctgcaagtgttttgcaatcactgatggactagcactaactgggtaatggtggctgttggaagagggtttct

SEQ ID NO: 95658 - DNA, 600 bp, Chicken  19866894618164_7
ttagcttttcccttctgcaragggctggaattcctgtgaatggccaggagaggtgcaagggaaggactakatctgtatggggtgatgctgttgaaagcagcaagtttacatttatgctatragctgctggttgctatcactgatccctatttttttttcctcagggaagccctgaatgctaacagtgtgctaatgagtatgatatctgtctctaggccttttaggattagaggaatcacagcgttttacaaacaaaatcctccaagctgcacgtgcgtgctatccatcagtagggattgsagcaggatgcagcatctgaactttctgacccgtgtgttaagccagcagagctgcaagtgttttgcaatcactgatggactagcactaactgggtaatggtggctgttggaagagggtttctttttaacctagatctgcccatgttggaaatacacagtgtctggcagcaagagggagactggggttggacttcatttgcaccacacatgtaaatgaggaaaactgtgatcgcttttgacatttctctctgcttgaaattgcttgcccacaaaataggcttttcatgcctggctagctgtt

SEQ ID NO: 95659 - DNA, 600 bp, Chicken  19866894618174_1
atagtttagttttatagaaaatattttaattttgtctagcagctgtgatctgagttttctgtggagcctattaattacggctgccattctgtgaattaggtcagaacagtgtctcaagtactcttgctacagaaggaatattccttagtttgaaaatggtaatttttactgaacttaaagccataccagtcccctaatttctacttctctttagttaatggcaactggggaccatggtctccgtgggatgcttgcacagtgacgtgtggaggaggacttcagaaacgcagccgtctctgyaataatcctgagcctcaatatggtgggaagrcttgtgtaggtgaagctaaaggaactcaggtctgcaacaaacaggactgtccagttggtgagtattccttttccatggtcatctaatggttgtggccaatctctactatactgcttaaaaaatatggcctaagtctttaaaaccaaagtgcttaaactttgaactggcataaactggcgtattggcaaaacacaacatggcagcaacgtccctcatcttaactctcatttgtttctcagatgggtgtctgtctaatccctgctttgcgg

SEQ ID NO: 95660 - DNA, 600 bp, Chicken  19866894618174_2
ttgtctagcagctgtgatctgagttttctgtggagcctattaattacggctgccattctgtgaattaggtcagaacagtgtctcaagtactcttgctacagaaggaatattccttagtttgaaaatggtaatttttactgaacttaaagccataccagtcccctaatttctacttctctttagttaatggcaactggggaccatggtctccgtgggatgcttgcacagtgacgtgtggaggaggacttcagaaacgcagccgtctctgyaataatcctgagcctcaatatggtgggaagrcttgtgtaggtgaagctaaaggaactcaggtctgcaacaaacaggactgtccagttggtgagtattccttttccatggtcatctaatggttgtggccaatctctactatactgcttaaaaaatatggcctaagtctttaaaaccaaagtgcttaaactttgaactggcataaactggcgtattggcaaaacacaacatggcagcaacgtccctcatcttaactctcatttgtttctcagatgggtgtctgtctaatccctgctttgcgggaactacatgtacaagctcccctgatggttc

SEQ ID NO: 95661 - DNA, 600 bp, Chicken  19866894618174_3
cagtatgaattataaaaatgctctctccagccatggagaattctgacattatgtataattttaagaaagtaatttaataaatattaatttacagtagagcaatacatacctttgaaggtctttttgtgcattattctacttgaacgtaagagctctgaacaagagaaacagtgctaagaaaggtactggagttacggagtggagagaaaagaatgtattaggctttttctttccctattgaaacatccttgatgaaaataggcatgtatcctttgccttgttagaatctctaggtaaaaytgtgtgataaaaagatgtttccagtggatttaatttctgtgtggtcttctaggtctgcaagccacgtaatccatgcacggatggaacacatgattgcaacaagaatgccaaatgcaattaccttggccacttcagtgacccaatgtatcgttgtgaatgtaaaccaggctatgctggcaatggcataatctgtggagaagatactgacttggatggatggccaaatgagaaccttgtctgtgttgccaatgccacttaccactgtaaaaaagtacgtttatcccatattcctatagaatg

SEQ ID NO: 95662 - DNA, 600 bp, Chicken  19866894618193_1
ggagatttcatctattaaaatgccgctgtctctgcactgtagatacaggtactttgctgactacatttaggcagacttatttaaggcagggagaagtgtgcccctgccacgaaaacgtgctgcgtcatccccagccaaatttcagtttcctatcatgaagcacagggatcccaaagcttctcaaagaaaggaagtgctgtgactattctgacacaaagtcaaaaaaaccttttccctatactccttttcacagataatttaggtttaattactgtaaacaattcaaccagaagcagatayttgcttggaaatgcttgcaacccaaatgctgaaagtaactaagtaataattagctggaaatagtaccttgcaaatcaagcaacactagcgtaggctccagggatagctgtgtctatagctgccctgaactgaaaatcactaaaagaattatgactgttttaaagtgtgtgtgtgtactttggaacaatgtggtctattagttgcgtgaaaatgctgaatggaattgaaatgggctcttgtcctttgttgattgagagctttgtgacaacacagtatttgccaagagaacaggtgaggaca

SEQ ID NO: 95663 - DNA, 599 bp, Chicken  19866894618208_1
  misc_feature (1)..(13): n is any nucleotide
nnnnnnnnnnnnngctgggcatgcctcacctctaatcatggccctataaaaacaccacccagagctgcagggctgtgcgtaacagctgacaaggctgtggcagacagtttgaccagacctaccacccaggcatggcttcctctcaggaaagcttcagagatgcgtgggcggtgtctactgctatttttctcctctctcagcacatgccaccatggagatgaagggaaaggcaagccatcatttacccagccacaaggtatcgatgaaaatgaatggaacaaatttaggctatatttagaytgaagctggttggggttttgttttccctcccctctctctcagagtggtatggaacactcaaggccaatgccatctccatgcggtaagaggaaaggtgcacctatccatgagcacaacaggatgctaggcagaagggatccagaggactgggtgtaaaaatgaggccaggctaaggcaagcagcaaacaaaagggtcccagtgcttgcatctacatacagtggctccatacccatatgtctccagatttactgcatcaggcttccaagggagcgaaagccctcagcagtaattctgatgc

SEQ ID NO: 95664 - DNA, 599 bp, Chicken  19866894618215_1
  misc_feature (1)..(3): n is any nucleotide
nnntccttgccttccctccccttccctttccttcccctttttcagcccctttccaccccaaacccacactcaaatcctgttgcatcctaacgccataacagagccacataaccatttcccagggcattaggacatccattcccaatcccatgaagctgtctccatccctacccgacggcataggtggccgagggctcaccactgatagcgacagctcctctcgccacccgcaacatcagctgcgcccttgattgaattatgaggctgcaatccgcttccctcctggctgcggtgcgcacrgcgtgaggcttagatggtgaacccgagcgccttaattcaataaggagcaggcaggcagtgtacttggatagctactgggatttctccttctccccagctcgcaatgcactgatttgtactggggtgcccagacaatgcccagatcctgtctgggggttttgttcccatcagagtctgctctttctctaaagcaggaatccagtgcttccagcctaaggctcatgggggacaaggagggattgggtgttgttacagttggtgccactgctcattgattttggtggggattcagtgttggg

SEQ ID NO: 95665 - DNA, 600 bp, Chicken  19866894618216_1
atattggcagtagctgttacacagtgtgtcatacacagctttgccaggcccctttcagaggtggctgacgtagaggcagatccttgttacagacatgctgtagcagggctatcaccatggctcacctggtgcagaagatctactcttgcactcatttaggctgggaacattttatgctagggcagccttggcttggtgcgtgtgctgcactttaagcttcacagtattcagggtggtactgacaaggctgaagggaaacagggttgcaggtgattaacacaccttttgtcctaggtttcyttgccctgttttgatgacatgatctactctgttgtcctctccactgctctagccccttcctgtgtatccagcgtggccttttgcatcacagttgctctggagaccagctcatgatcagcagcagaggctgcagctaccttgcccaggcagagatgtgctggggcatctggagtcattgcccaatgggaccgtgggaactcataatctatttctcagctgcagctgcttaatttaaaaaagcatacagacttggagagggtgctgtggcatcttgcattgaacagattgtttgctagggaa

SEQ ID NO: 95666 - DNA, 600 bp, Chicken  19866894618224_1
aagagggagccaagcttgctcaactggtgaaatttagagagcctgaagacgcaacccagtcctctaaagaaacacagattaaatggtatcccttttagttggtagagtgtttcaaaaatgttatgaataaatcataaaaaacctcagatgtgtatagatcaaagagcttgcagcaggcactgggtaaacaaggactttgtggcaggagcctactgtcagggttgcaggttaaacgctcaaaacacatcccataaattcagagggcaatcagtgacagtgaaggttattaaagcagacccyttcacgtgggttggctgtgcattactgatttctgtttttaagcatagagctcggtttaacagttgtgaggtggattatgtacatgctggtggtgctcctaagcctagtcagggcctttccaaaagtgggcctgggaacacaccatggctgtgtaggtctgggtgtatctctcttgtggtttttcctctcaactgcagaaaatagtttagtgtagttatccatatgtttcctatagtaaagcagcagcacttatcccataattaatggatggggacgacttgctactgtcaggtcaaagaa

SEQ ID NO: 95667 - DNA, 600 bp, Chicken  19866894618230_1
tatttgcaactccatttccagttgacatgaatacataacctgcaaattttcaaatggaatacatagggttgtaatcaggcactcaaatcaaaagtctagttggatctccttaccagacttctatatgccctgtcttagcagagagaaatatcctctcactcgacagcaatagtgggtcacctccaatggtgcagattgttatgagtgcggtctctttcttgttcatcactgacagaaatgcataaaccgagacaattcctcttcattcagtgcagcccaggcaaggcaaaaggttgaacrctcatgcattagctgaagcccattgttgaatttgctttacaatgaagtaaagaacagcaacgcactcattttttgcaccctaacccctttgctgcttcccataagttaaggggtaatttcccctcccctctactgggagatgactgagcaacttccgtgtgaattcttcttacacatttgattacattgattagttaagcagaaatcacatccacagtagggatctgtttttcatctttgttggtcattactggcaattttaactaattaaatcccccttgattttaaagactatatcaa

SEQ ID NO: 95668 - DNA, 600 bp, Chicken  19866894618238_1
ttactccagcaaagcatccaattgtaatcaatttaataagcagcaaagcaagcgctttgactaaatgaaaagcttccagccacgtctctgcctactagcctgtgcacgctggcactgctctgctcagcatctcagctccacttggcccctgcacactccatcccttggcagctcaggcagtgcctgtcctgctgtgctgctgctatccacctgctcttcccactctgggagtgtgagcagcattagtctattcagctcgcatgagacaggcctgagtaattacaccttggagactttccyggagctgaggataaacatcaggaaagcagaggtttatttactcctaatctaagcagaatttacccagttcttggtacccagcatggaatgttttactcagtttagttatgttttagacactcrgtgtctgagagcactgtccaaatgctccttaaaatccggcagctcgggagctgtacgcattaccctgaggaacctgttccatgcccacagccctctggtgcaggaccttttcctaacacccaacctgacccawccctgttacagctccatgccattcccccaggtcctgttgctgtc

SEQ ID NO: 95669 - DNA, 600 bp, Chicken  19866894618238_2
tcagcatctcagctccacttggcccctgcacactccatcccttggcagctcaggcagtgcctgtcctgctgtgctgctgctatccacctgctcttcccactctgggagtgtgagcagcattagtctattcagctcgcatgagacaggcctgagtaattacaccttggagactttccyggagctgaggataaacatcaggaaagcagaggtttatttactcctaatctaagcagaatttacccagttcttggtacccagcatggaatgttttactcagtttagttatgttttagacactcrgtgtctgagagcactgtccaaatgctccttaaaatccggcagctcgggagctgtacgcattaccctgaggaacctgttccatgcccacagccctctggtgcaggaccttttcctaacacccaacctgacccawccctgttacagctccatgccattcccccaggtcctgttgctgtcaccagagagcagagctcagcgctgctcctccgctccctgtgaggagctgtagctgccatgaggcctcccctcagccagctctgctctgggctgcacgaaccagggggctgcagcaccttctta

SEQ ID NO: 95670 - DNA, 546 bp, Chicken  19866894618238_3
tcgcatgagacaggcctgagtaattacaccttggagactttccyggagctgaggataaacatcaggaaagcagaggtttatttactcctaatctaagcagaatttacccagttcttggtacccagcatggaatgttttactcagtttagttatgttttagacactcrgtgtctgagagcactgtccaaatgctccttaaaatccggcagctcgggagctgtacgcattaccctgaggaacctgttccatgcccacagccctctggtgcaggaccttttcctaacacccaacctgacccawccctgttacagctccatgccattcccccaggtcctgttgctgtcaccagagagcagagctcagcgctgctcctccgctccctgtgaggagctgtagctgccatgaggcctcccctcagccagctctgctctgggctgcacgaaccagggggctgcagcaccttcttatatgtcttggcctcgagatcttttactgctttcatagccttcttttggatgctctttaatacatctatgtccttcttaa

SEQ ID NO: 95671 - DNA, 599 bp, Chicken  19866894618240_1
  misc_feature (1)..(18): n is any nucleotide
nnnnnnnnnnnnnnnnnngcacatagcagacaaagtgtgttctgagatcaccttaattgaggaggtatgccagcaacatgcagtctgtggatgctgatagtgctcaggcactgaccttgattgatatgcttcagacatgcatctttaggaaacaacccaaatgccaagtagctaccttgagaagatggctgtggagagctgacatgaagaagataacgtgtatccagaggtctgaggatctcaaccagttttaagctgagtcatttcaagtcacagtaataaaatgtacaatggcctgtwttggcttaaaccaagtgaatattacattgtccgtgtagtggaagcctagagcagatgctcagggaggagtaagaaaagggcaagcatgtataatgggtgctttagccattttgcaaatctaatcttaatttgtttggactagaagcacagaaagcattyagtgctaggaaactcagcattaccttattttataaacattcagcacagtattcactgcagctagcatgctgattggggatgtgcccaatctgctgctggaaatcatgaagacagggtttgtttgcagtttgattgctggc

SEQ ID NO: 95672 - DNA, 576 bp, Chicken  19866894618240_2
aatgccaagtagctaccttgagaagatggctgtggagagctgacatgaagaagataacgtgtatccagaggtctgaggatctcaaccagttttaagctgagtcatttcaagtcacagtaataaaatgtacaatggcctgtwttggcttaaaccaagtgaatattacattgtccgtgtagtggaagcctagagcagatgctcagggaggagtaagaaaagggcaagcatgtataatgggtgctttagccattttgcaaatctaatcttaatttgtttggactagaagcacagaaagcattyagtgctaggaaactcagcattaccttattttataaacattcagcacagtattcactgcagctagcatgctgattggggatgtgcccaatctgctgctggaaatcatgaagacagggtttgtttgcagtttgattgctggcaaagagcttcattacttcattgtaccactgttgtaagaccagctttcacagcttgaaagtgtgttcttgaaattagaactcttaaactgttcccattggtgaaagggatgatttattttctcccctaggaagtgtg

SEQ ID NO: 95673 - DNA, 599 bp, Chicken  19866894618248_1
  misc_feature (1)..(91): n is any nucleotide
nnnnnnnnnnnnnnnnnnnnnnnnnnnnnnnnnnnnnnnnnnnnnnnnnnnnnnnnnnnnnnnnnnnnnnnnnnnnnnnnnnnnnnnnnnnaacaaaatatttctttggagtcaggcgaagaaagcaaaacatcacttgtcttttagacagctaatagacctaatatagttcattaattccagttcctcagtgttcttgaagggaaacccaggaaggaataaggaggcggggacgctagaagattacgaggcagttgttgtgtttatgtctggcagaggcaggcaggtagagcttctagyggagttgcacagtccttactgctgtcttttacagagctgtgttcctcttgcacacgcagcacgcatacagtaagctccttctgctcttcgggaaagctggctcctggagagcaggaacagccagagagctgcttgrtacctgccgcccatttgcagcctatcctgtagaagtctacagctaggagcaggctgtatgaattgtcagtattttttcctccttgtaaatagtgtatgtataataaacttggtgctttgtgaagcattatgcctgttgctgaacagatggaatagacaacaga

SEQ ID NO: 95674 - DNA, 600 bp, Chicken  19866894618248_2
ttgtcttttagacagctaatagacctaatatagttcattaattccagttcctcagtgttcttgaagggaaacccaggaaggaataaggaggcggggacgctagaagattacgaggcagttgttgtgtttatgtctggcagaggcaggcaggtagagcttctagyggagttgcacagtccttactgctgtcttttacagagctgtgttcctcttgcacacgcagcacgcatacagtaagctccttctgctcttcgggaaagctggctcctggagagcaggaacagccagagagctgcttgrtacctgccgcccatttgcagcctatcctgtagaagtctacagctaggagcaggctgtatgaattgtcagtattttttcctccttgtaaatagtgtatgtataataaacttggtgctttgtgaagcattatgcctgttgctgaacagatggaatagacaacagatctgcattagatactgatttattgttatatctgaaaacgtaacctggtataaaatcatgmctctgaactcrtgctagttttttgaatgagaattgyaaatagcttayagaaaactgaggaaccttcctgaaaatgaa

SEQ ID NO: 95675 - DNA, 600 bp, Chicken  19866894618248_3
ccaggaaggaataaggaggcggggacgctagaagattacgaggcagttgttgtgtttatgtctggcagaggcaggcaggtagagcttctagyggagttgcacagtccttactgctgtcttttacagagctgtgttcctcttgcacacgcagcacgcatacagtaagctccttctgctcttcgggaaagctggctcctggagagcaggaacagccagagagctgcttgrtacctgccgcccatttgcagcctatcctgtagaagtctacagctaggagcaggctgtatgaattgtcagtartttttcctccttgtaaatagtgtatgtataataaacttggtgctttgtgaagcattatgcctgttgctgaacagatggaatagacaacagatctgcattagatactgatttattgttatatctgaaaacgtaacctggtataaaatcatgmctctgaactcrtgctagttttttgaatgagaattgyaaatagcttayagaaaactgaggaaccttcctgaaaatgaagtgatttattatgtgtgcttttccttcagagttcagtggtgagattgaagtcccagtgatgttttatttgca

SEQ ID NO: 95676 - DNA, 472 bp, Chicken  19866894618248_4
cacgcatacagtaagctccttctgctcttcgggaaagctggctcctggagagcaggaacagccagagagctgcttgrtacctgccgcccatttgcagcctatcctgtagaagtctacagctaggagcaggctgtatgaattgtcagtattttttcctccttgtaaatagtgtatgtataataaacttggtgctttgtgaagcattatgcctgttgctgaacagatggaatagacaacagatctgcattagatactgatttattgttatatctgaaaacgtaacctggtataaaatcatgmctctgaactcrtgctagttttttgaatgagaattgyaaatagcttayagaaaactgaggaaccttcctgaaaatgaagtgatttattatgtgtgcttttccttcagagttcagtggtgagattgaagtcccagtgatgttttatttgcacgaaagggtcagcctcctctaaa

SEQ ID NO: 95677 - DNA, 461 bp, Chicken  19866894618248_5
taagctccttctgctcttcgggaaagctggctcctggagagcaggaacagccagagagctgcttgrtacctgccgcccatttgcagcctatcctgtagaagtctacagctaggagcaggctgtatgaattgtcagtattttttcctccttgtaaatagtgtatgtataataaacttggtgctttgtgaagcattatgcctgttgctgaacagatggaatagacaacagatctgcattagatactgatttattgttatatctgaaaacgtaacctggtataaaatcatgmctctgaactcrtgctagttttttgaatgagaattgyaaatagcttayagaaaactgaggaaccttcctgaaaatgaagtgatttattatgtgtgcttttccttcagagttcagtggtgagattgaagtcccagtgatgttttatttgcacgaaagggtcagcctcctctaaa

SEQ ID NO: 95678 - DNA, 436 bp, Chicken  19866894618248_6
gctggctcctggagagcaggaacagccagagagctgcttgrtacctgccgcccatttgcagcctatcctgtagaagtctacagctaggagcaggctgtatgaattgtcagtattttttcctccttgtaaatagtgtatgtataataaacttggtgctttgtgaagcattatgcctgttgctgaacagatggaatagacaacagatctgcattagatactgatttattgttatatctgaaaacgtaacctggtataaaatcatgmctctgaactcrtgctagttttttgaatgagaattgyaaatagcttayagaaaactgaggaaccttcctgaaaatgaagtgatttattatgtgtgcttttccttcagagttcagtggtgagattgaagtcccagtgatgttttatttgcacgaaagggtcagcctcctctaaa

SEQ ID NO: 95679 - DNA, 425 bp, Chicken  19866894618248_7
gagagcaggaacagccagagagctgcttgrtacctgccgcccatttgcagcctatcctgtagaagtctacagctaggagcaggctgtatgaattgtcagtattttttcctccttgtaaatagtgtatgtataataaacttggtgctttgtgaagcattatgcctgttgctgaacagatggaatagacaacagatctgcattagatactgatttattgttatatctgaaaacgtaacctggtataaaatcatgmctctgaactcrtgctagttttttgaatgagaattgyaaatagcttayagaaaactgaggaaccttcctgaaaatgaagtgatttattatgtgtgcttttccttcagagttcagtggtgagattgaagtcccagtgatgttttatttgcacgaaagggtcagcctcctctaaa

SEQ ID NO: 95680 - DNA, 600 bp, Chicken  19866894618249_1
ctgtgtccgaagcctgcccttggccagtgagaatgtgaattgaaggctccttctgctcgtgggaccgcggcacaaagcggaaaggcgctgcggtcagctgcagatttttccctgtttatttgctttgccgctgttgaacacagatctgaggatcgagtgggaatgaaaggtggcagagacaatggggacattctgagagggactcggggcagctgacatcccaccgaacccatgacagccacagcaggaagaggtttctgcgtgcagaacctgtgcctcgcaaaccacgtggggctgttkgaagatgataaggygcattaaagcgagcacgatcccggccaccaagtacactcgggtctctctgaagtttgtgataagttttttccctttccaaagcctctcaaaaaaccaaccaaaacggcactgttacgggttaagagcaaacagcacattggctccttcccccgctacggaccaaaagctgcaaagtcctcagtgacccccgaaaagtaaacaggaggagttgggagaggctgtaccaggacgcaaaggaaacagagctgcgttcagctgacacgttccaggagtgcatcccaccag

SEQ ID NO: 95681 - DNA, 600 bp, Chicken  19866894618249_2
tgcccttggccagtgagaatgtgaattgaaggctccttctgctcgtgggaccgcggcacaaagcggaaaggcgctgcggtcagctgcagatttttccctgtttatttgctttgccgctgttgaacacagatctgaggatcgagtgggaatgaaaggtggcagagacaatggggacattctgagagggactcggggcagctgacatcccaccgaacccatgacagccacagcaggaagaggtttctgcgtgcagaacctgtgcctcgcaaaccacgtggggctgttkgaagatgataaggygcattaaagcgagcacgatcccggccaccaagtacactcgggtctctctgaagtttgtgataagttttttccctttccaaagcctctcaaaaaaccaaccaaaacggcactgttacgggttaagagcaaacagcacattggctccttcccccgctacggaccaaaagctgcaaagtcctcagtgacccccgaaaagtaaacaggaggagttgggagaggctgtaccaggacgcaaaggaaacagagctgcgttcagctgacacgttccaggagtgcatcccaccaggctctgccagtggg

SEQ ID NO: 95682 - DNA, 600 bp, Chicken  19866894618255_1
ctctgagtttcactgtcttgcaatttgatgtggagatcttcattccgacttgcacagaaatttatgaaataaatggggaaatgtagcttatttcattagcttggtgattaaaaaaattagtttcagccattgagcagtttagcagacctccattcatttttataaggaaatatttgcctggcttctttctgtgaatttatatgaaaaaataaacaaatcttctcccatctgtgtctttttaataaggacacatctaatgtgaataatcagaaattaagtcctaacagaaggctaacacaytaagtgtaacacactccttaccttgtaattggcgtgtagattgggaagttaaaacagtggaataacaacgccccaaagtattttggatctaggatttatatgcagattttcaaggcaaccaggcagaatcgggtatgtcattcagagctcccttcagcacttgggggtttgggtttgggtttgggtttggagatccatgcggtgctgtttgaaaccaggagagaaaaacacccgtcatattctcatattcctgagacagcactgagataatttttgcagtgataacagtgtcagtgcgag

SEQ ID NO: 95683 - DNA, 600 bp, Chicken  19866894618258_1
gctaagcaaattatgaccacagcctgctgtaatctaagtgtatgctatgaatagttttgtgtttcagaagacaaattgcagcaccaagaggccaggtatttccttaaagagaaattaaaacagactttcagccatatagctttactttgcaatattcattgacttggcagtgcaggatacatatgttacttcggtgagtgagcctgaggtttttccattaacatgacaagtaatgtggcacttggttactttttctgacaatcttaataacacgaaggaattgcaaagcaagtcatgatrttattttattgcaagacattttcaagttcagagttggcgggactgaataaactacctgaataataaacagtggaaaaaactattatgaaaccgagcctacatcgatacttctcaggtataaagaaagctcatttaatatttaatagcaaacagctctgaaaaatgtcaagcaatctccaaactgagatattataataataatgatgctgctgaattcacagtatgaataaacattaagacctacaaacacacaggacaaacgttaacctcagattaagcaaatgttagctgcctgcaagc

SEQ ID NO: 95684 - DNA, 600 bp, Chicken  19866894618258_2
aaactattatgaaaccgagcctacatcgatacttctcaggtataaagaaagctcatttaatatttaatagcaaacagctctgaaaaatgtcaagcaatctccaaactgagatattataataataatgatgctgctgaattcacagtatgaataaacattaagacctacaaacacacaggacaaacgttaacctcagattaagcaaatgttagctgcctgcaagcagtgataaagatactagagctgcttctggaatgacatctcactgaaactggtgagaggtttgctattgactgcaasagagccaaaatttcattcctgaactgtgcgatgaggtgttcaagtgaaatgactcagatgttggagaaggttgccagatactgcwgatcaacagcacaggttttgtttaatataaaaaatagcattaacttaggtgaaataaaagctttagattagaaattatattaaatgcaacaaaacagatgaatgccttattaagcttgaaaatgtgttctaacaacaacaactacattaaagaaaaaaaacaaacatgttcgtgcattattatcattaatgcactcatttagtgtttatgtacta

SEQ ID NO: 95685 - DNA, 600 bp, Chicken  19866894618258_3
aatgtcaagcaatctccaaactgagatattataataataatgatgctgctgaattcacagtatgaataaacattaagacctacaaacacacaggacaaacgttaacctcagattaagcaaatgttagctgcctgcaagcagtgataaagatactagagctgcttctggaatgacatctcactgaaactggtgagaggtttgctattgactgcaasagagccaaaatttcattcctgaactgtgcgatgaggtgttcaagtgaaatgactcagatgttggagaaggttgccagatactgcwgatcaacagcacaggttttgtttaatataaaaaatagcattaacttaggtgaaataaaagctttagattagaaattatattaaatgcaacaaaacagatgaatgccttattaagcttgaaaatgtgttctaacaacaacaactacattaaagaaaaaaaacaaacatgttcgtgcattattatcattaatgcactcatttagtgtttatgtactaacttggccattaccataaaacacagaccagccagattcatgcactgagccaggctacccaggaggctgtgaaacctctgtcctgg

SEQ ID NO: 95686 - DNA, 600 bp, Chicken  19866894618259_1
tgagccaaaattgcccagtactgcattggtgtttactccaaagggtgaaaagcctacagatagctgatggtatcccagacagcagacaagaaagaatgccatcttggaagaggaatacagtgctatgcagcagaatatctcagtgctgtatgtgctgtcatcactgaagcctccaagggggcccccagcaggactcaatcctcctgcattatctgggctcttctgggcacaaaggctcttctttcaaggtctacgcttgtactggaaatggaagataacaggcaacacaagcagatgtakcttgaactgatttctgtttcagttcggagggtgcaccttctattgttttccataagccggattcgttatagagggagcggagtcctgcaagcgcaggtcttcgtctttcctatctgaagtgccccctggtggcaccacgttcgcacacgtcgggtaaattcttggccgaaagacggcgaacggtcacccggcttttcttcgcccccagaacgttcagcacggagcacgctgcgagctgcccctgcccggaggagccaggaaggactctcgtcgcacccgagcagctgagaagtcccttcc

SEQ ID NO: 95687 - DNA, 599 bp, Chicken  19866894618263_1
  misc_feature (1)..(147): n is any nucleotide
nnnnnnnnnnnnnnnnnnnnnnnnnnnnnnnnnnnnnnnnnnnnnnnnnnnnnnnnnnnnnnnnnnnnnnnnnnnnnnnnnnnnnnnnnnnnnnnnnnnnnnnnnnnnnnnnnnnnnnnnnnnnnnnnnnnnnnnnnnnnnnnnnnnttttattgcagcaacaaaacatttcacagctcctaaatagtgtaagctactgaagtccagatccagcagactacttgagcaggttcttaaatgttaagagtgttatctcaactaacacgtatggaagaagtcagaagatttaagctaggcacrccttgaaaatattcttgtgaatcaataccactcatctgactgagcaaatgtaaaacatgagtgcatactaagatggagtgatcacgtattttccttcttccctcaaacccacacatccacaactgcacccaaccctgatgggcaaaggaggattttctgctcccttgtttttgtgcacaagaaatccaaagtaatatttttccttataactgctctcctgcgatgggaggaaaactcttgttatgtttttatctcgaattcagtaagtcctgtgagaggtgattgtttacacttggcca

SEQ ID NO: 95688 - DNA, 600 bp, Chicken  19866894618268_1
atgagaagtgaatgatctgctccctaaatgtgaaactaaaagcaatacatcttactcctacattaaacaaccatatttatgctccagatagccaatgactgaatcaaaaatgactattctgatgaaccctggcattcagctcttccttttcttcttgtttaatagcagaacaaaatgtcagtctaataaattaaaacatcaaggtctgtatctacgaagaaccccaaaatgcatgaaagcttgctactaaattgctacatgcaaagtcatcaatgtcatctgagagatcaggatccaagwatctaatacgacactgaacagacagatatgtgccctgttttattctaaacagggccatcatctctttatatttctaccacaatgaaggggacaagctttaggattatkatgaatattttgcttaatcagacatgcaagtgaaagcacttggagcttgatgttagcaagaaaactctaaacaaaccaaaatctaaccattagttcactattgcctggtgaaaggtctagtgtgcagcaccaggtcatctcttgataaattttttgcactttgcctcaaacctggaaaactgaagctaagat

SEQ ID NO: 95689 - DNA, 600 bp, Chicken  19866894618268_2
ctaaaagcaatacatcttactcctacattaaacaaccatatttatgctccagatagccaatgactgaatcaaaaatgactattctgatgaaccctggcattcagctcttccttttcttcttgtttaatagcagaacaaaatgtcagtctaataaattaaaacatcaaggtctgtatctacgaagaaccccaaaatgcatgaaagcttgctactaaattgctacatgcaaagtcatcaatgtcatctgagagatcaggatccaagwatctaatacgacactgaacagacagatatgtgccwtgttttattctaaacagggccatcatctctttatatttctaccacaatgaaggggacaagctttaggattatkatgaatattttgcttaatcagacatgcaagtgaaagcacttggagcttgatgttagcaagaaaactctaaacaaaccaaaatctaaccattagttcactattgcctggtgaaaggtctagtgtgcagcaccaggtcatctcttgataaattttttgcactttgcctcaaacctggaaaactgaagctaagatacgatgcagtgactcagataaaaaaacctgcaacc

SEQ ID NO: 95690 - DNA, 600 bp, Chicken  19866894618268_3
taaaagcaatacatcttactcctacattaaacaaccatatttatgctccagatagccaatgactgaatcaaaaatgactattctgatgaaccctggcattcagctcttccttttcttcttgtttaatagcagaacaaaatgtcagtctaataaattaaaacatcaaggtctgtatctacgaagaaccccaaaatgcatgaaagcttgctactaaattgctacatgcaaagtcatcaatgtcatctgagagatcaggatccaagwatctaatacgacactgaacagacagatatgtgcccwgttttattctaaacagggccatcatctctttatatttctaccacaatgaaggggacaagctttaggattatkatgaatattttgcttaatcagacatgcaagtgaaagcacttggagcttgatgttagcaagaaaactctaaacaaaccaaaatctaaccattagttcactattgcctggtgaaaggtctagtgtgcagcaccaggtcatctcttgataaattttttgcactttgcctcaaacctggaaaactgaagctaagatacgatgcagtgactcagataaaaaaacctgcaacct

SEQ ID NO: 95691 - DNA, 600 bp, Chicken  19866894618268_4
aatgactattctgatgaaccctggcattcagctcttccttttcttcttgtttaatagcagaacaaaatgtcagtctaataaattaaaacatcaaggtctgtatctacgaagaaccccaaaatgcatgaaagcttgctactaaattgctacatgcaaagtcatcaatgtcatctgagagatcaggatccaagwatctaatacgacactgaacagacagatatgtgccctgttttattctaaacagggccatcatctctttatatttctaccacaatgaaggggacaagctttaggattatkatgaatattttgcttaatcagacatgcaagtgaaagcacttggagcttgatgttagcaagaaaactctaaacaaaccaaaatctaaccattagttcactattgcctggtgaaaggtctagtgtgcagcaccaggtcatctcttgataaattttttgcactttgcctcaaacctggaaaactgaagctaagatacgatgcagtgactcagataaaaaaacctgcaaccttggaagatgtatgattgatgtgctgagcgatgagtgagcatttgcacagttgcagcaattggtttatatttg

SEQ ID NO: 95692 - DNA, 600 bp, Chicken  19866894618272_1
ctcttggggttaaggtattctatttgttttctctgccttaagatcatgcactcaattaccaaagtctgtctgatgagttgtaactcgttaagccacactattccaattgtgttggagttgatgatgacttgtgaggttggctggcatgaaagaatggtgtcacagcttttctgagacctctagagaatactgaaagcgatgaatgaaatgtttatatatacgcggtttccatcaaatctaactccagttgcatactctgtgggggtccacatctgaaccagctgtttaagcacctcactrcagtcaaggaagatcacaatagggttaggagcttgctgtctcagctcaattcctatacataggtatctacagcacttgatatcagtcattatggacacaatccagtcatgcatccatgtgtttgtgcctgctgtagtggcagctgatggccagatagacagataggttgatagcaatctgaagaaacagtatatatctacatgtgggtaactgaatgaagctctgttgcatacccatctcactgaattaagagatctgtttttcctacacatccactacactctacctccagagacagga

SEQ ID NO: 95693 - DNA, 600 bp, Chicken  19866894618272_2
tgaagaaacagtatatatctacatgtgggtaactgaatgaagctctgttgcatacccatctcactgaattaagagatctgtttttcctacacatccactacactctacctccagagacaggacaatgggcaaagtggatcttcagtttgacaaggtgcattttcctgtgtgctatttctccgtaacaatgtgtttattgggaaaggtgtctcaggcaaggatttactgttcagaataagaccatgccaggaacagacagtaaagcagcagatcagtagggtttaggttgtggactgggcygtagtggagatgactgatgaacatttctgattaggagagtttaggtggtgctgtatgcagctctaaattctggtactccagaaggatcacgttgtaattgattcctgcattggtcttacatatgatcaaaatcatagaatcacagaatggtttgggttggcagggaccttaaagattatctagttccaacctccctgctattttcagggacacctccctctagctcaggttgctgcctggaagtaggtgttatttgaattattaacaaaacaactagcattagtacaattctagagagtt

SEQ ID NO: 95694 - DNA, 600 bp, Chicken  19866894618280_1
aaaaattatggtcgtttccaagattacacacatttggtttctgtcagtggtgcagaggataccacaaacacacatgaggtttgtaacttaaacagtactctgaagacacgggtctccttgcaacccaagtgtaattctggtttgcttcttggagactgtttccagccagaggatgttacacataaaccaacatttgctggaaggagcagtggagctttcaatagatgtgtcacttaagaggattgatgtagcattcaacatatcagattactattcacaagtctttaagagaagatattygacactttatgattgatatgtagagttactgggaggacttaacacagacgaatggcttcatgagagaatcagcggagcagcagccagtggcaagacactgcattgaattacacgggcaattctgaaatatgctgcttttgttcagatactgtgacaggcaacagtatggaacacacgtcactgaaccatcccagacccactaacaaagttacatgcccagatctgcaaagaattcacaagtgtttaatcctgattcatcaagttttgactttttgacaatttttgttttgtttttttgac

SEQ ID NO: 95695 - DNA, 600 bp, Chicken  19866894618295_1
catgcacagtttcctttgtttttaacttcctacattttattctcttgatgaagagggaacacatggcttatggttattctagtaaatgtaaaagcaccggagaatgctttctggcactgaggaggctggcatgaagtatcccacatttacccagatgcattattttcaaaacagtgaccacctgcaaactgcctttctctgagctgtgccagttcctggactctgcccagtaactgtcgtgagaattcaaactggcccaggctgaaagcactgttcttagaatttagcagtgtacacttrtgtgtgtgtgaccatatgccattttttctgttttcaaaatgaattatgagcttgcactgtggctgtaggatttgctttgatgcattggatgggagatgacagatacatctaaagctctttatcttgttttttgttcccttggtattccaaaaccactcctttagatcaaattcaatccaaagcacacaggtgtgccttggcaacatgctcactctgtacaaataattacaaggacgcatacagtcataacctcttccctactcagttgatggacaaaactgcaaacgagtcaacaggata

SEQ ID NO: 95696 - DNA, 599 bp, Chicken  19866894618299_1
  misc_feature (1)..(50): n is any nucleotide
nnnnnnnnnnnnnnnnnnnnnnnnnnnnnnnnnnnnnnnnnnnnnnnnnntgccttattcatcacagcaactacttaactactggtccagcacacagaatagagatctctcaataattaatattatttattcatccagagtcactctaagtatacatgaaagatagaaatatcactttttttcttttaaataaaagacaattctgtatggtgtaactttatgtcctgtttacattacttgaatgctgagaaacacacagaacaaattgtatataatttaaataactggcacaagaaaagktctgcgagaatgacacctgggtggaagctacagcagaaaatggagtgaaaaatgtcagccttgcttaagcccattgggtttttggcagtgcattgtaaagtctttaccttctgaaagctactacagatctgaaccctttccctcctccaaacacactgtcrttctttctgaattatttttaaagtctatacaaagccactagaaaaccaggatgatgacggggtgaatacaaaagaaggctccagcaaataaacaacagggtatatacatctaattatattccattacattcagaaaac

SEQ ID NO: 95697 - DNA, 600 bp, Chicken  19866894618299_2
gatagaaatatcactttttttcttttaaataaaagacaattctgtatggtgtaactttatgtcctgtttacattacttgaatgctgagaaacacacagaacaaattgtatataatttaaataactggcacaagaaaagktctgcgagaatgacacctgggtggaagctacagcagaaaatggagtgaaaaatgtcagccttgcttaagcccattgggtttttggcagtgcattgtaaagtctttaccttctgaaagctactacagatctgaaccctttccctcctccaaacacactgtcrttctttctgaattatttttaaagtctatacaaagccactagaaaaccaggatgatgacggggtgaatacaaaagaaggctccagcaaataaacaacagggtatatacatctaattatattccattacattcagaaaacaggaaaatgtggtttcttagaagaaacacrggacatgttattactactctttacaaaaggaaaaccatgaagaaataactagttgctcaaggttgccttattggcattcccagtctacagctaccactaactattcctcaataaagaaagcagacagcaaga

SEQ ID NO: 95698 - DNA, 600 bp, Chicken  19866894618299_3
acagcagaaaatggagtgaaaaatgtcagccttgcttaagcccattgggtttttggcagtgcattgtaaagtctttaccttctgaaagctactacagatctgaaccctttccctcctccaaacacactgtcrttctttctgaattatttttaaagtctatacaaagccactagaaaaccaggatgatgacggggtgaatacaaaagaaggctccagcaaataaacaacagggtatatacatctaattatattccattacattcagaaaacaggaaaatgtggtttcttagaagaaacacrggacatgttattactactctttacaaaaggaaaaccatgaagaaataactagttgctcaaggttgccttattggcattcccagtctacagctaccactaactattcctcaataaagaaagcagacagcaagaatgaagggagaaaataaccataagaaaaaaaaaaaagaaaagaaaagaaatcctttttcttggactaaagaagtatttcctactgtgcacctcttttttattgcatttggctaggctacttatgcaaatcagtgcctacagaccactgccatatgctgtgtatgaaac

SEQ ID NO: 95699 - DNA, 599 bp, Chicken  19866894618318_1
  misc_feature (1)..(231): n is any nucleotide
nnnnnnnnnnnnnnnnnnnnnnnnnnnnnnnnnnnnnnnnnnnnnnnnnnnnnnnnnnnnnnnnnnnnnnnnnnnnnnnnnnnnnnnnnnnnnnnnnnnnnnnnnnnnnnnnnnnnnnnnnnnnnnnnnnnnnnnnnnnnnnnnnnnnnnnnnnnnnnnnnnnnnnnnnnnnnnnnnnnnnnnnnnnnnnnnnnnnnnnnnnnnnnnnnnnnnnnnnnnnnnnnnnnnnnntagcgggactacccagggggatagccgttctccaagataacatggccagcataatccgaaagctctggygtccaaagtatgcaaataggtgacagtgtagggtagacaaagaaaggaagcagagaagtcagggcaaatacagtcaagagaaaatacagctccgtacttttggtcttttcttcttttgaacagcaaaatagatgaaaaaaatgatatatatatatatwtttttgatggtgggtgaggytttttgtaaattcagaatcctaacttttgacaaaatacaatgaatttatgaaaaaattttggattgttgaagcagcttgtactaatggtctcctaaagtactaagtttagggtagccaaac

SEQ ID NO: 95700 - DNA, 599 bp, Chicken  19866894618318_2
  misc_feature (1)..(73): n is any nucleotide
nnnnnnnnnnnnnnnnnnnnnnnnnnnnnnnnnnnnnnnnnnnnnnnnnnnnnnnnnnnnnnnnnnnnnnnnntagcgggactacccagggggatagccgttctccaagataacatggccagcataatccgaaagctctggygtccaaagtatgcaaataggtgacagtgtagggtagacaaagaaaggaagcagagaagtcagggcaaatacagtcaagagaaaatacagctccgtacttttggtcttttcttcttttgaacagcaaaatagatgaaaaaaatgatatatatatatatwtttttgatggtgggtgaggytttttgtaaattcagaatcctaacttttgacaaaatacaatgaatttatgaaaaaattttggattgttgaagcagcttgtactaatggtctcctaaagtactaagtttagggtagccaaacctctctgaaaactgatgggacactgagacttccactctgaaacatttttcacttcacaggcaatctacagcttctaaagcattttaagaggattaagtaatttgaaacagaaaataaataattccgacctcttcacatytcaagaaaatctgaaaaat

SEQ ID NO: 95701 - DNA, 599 bp, Chicken  19866894618318_3
  misc_feature (1)..(53): n is any nucleotide
nnnnnnnnnnnnnnnnnnnnnnnnnnnnnnnnnnnnnnnnnnnnnnnnnnnnntagcgggactacccagggggatagccgttctccaagataacatggccagcataatccgaaagctctggygtccaaagtatgcaaataggtgacagtgtagggtagacaaagaaaggaagcagagaagtcagggcaaatacagtcaagagaaaatacagctccgtacttttggtcttttcttcttttgaacagcaaaatagatgaaaaaaatgatatatatatatatwtttttgatggtgggtgaggytttttgtaaattcagaatcctaacttttgacaaaatacaatgaatttatgaaaaaattttggattgttgaagcagcttgtactaatggtctcctaaagtactaagtttagggtagccaaacctctctgaaaactgatgggacactgagacttccactctgaaacatttttcacttcacaggcaatctacagcttctaaagcattttaagaggattaagtaatttgaaacagaaaataaataattccgacctcttcacatytcaagaaaatctgaaaaattctgctttggtttaaaccaa

SEQ ID NO: 95702 - DNA, 521 bp, Chicken  19866894618318_4
aaatgatatatatatatatwtttttgatggtgggtgaggytttttgtaaattcagaatcctaacttttgacaaaatacaatgaatttatgaaaaaattttggattgttgaagcagcttgtactaatggtctcctaaagtactaagtttagggtagccaaacctctctgaaaactgatgggacactgagacttccactctgaaacatttttcacttcacaggcaatctacagcttctaaagcattttaagaggattaagtaatttgaaacagaaaataaataattccgacctcttcacatytcaagaaaatctgaaaaattctgctttggtttaaaccaaatgttttttttgtttgatacttctgctcagcaactgaactgaaaacccactattcatccagtctttacataggtaattgcagcttgaaaacgggaaaagttacataaattatgctcaacattccttctacttaattatttggtgggtattttcttgtagcttcaaagcacgagtggctcttg

SEQ ID NO: 95703 - DNA, 600 bp, Chicken  19866894618329_1
aaggttaccttacaacctacaagcacacccttacagtccctcctggtgaagttcttgaagaaaggaatatgctgtatgtgtgggaacagtggaaatagacaactgtgagaaaggcattgtatttaatctattttgaagttattctctaaatatctgctagtgacctacagcttgtcttctaagcatgcttacgtggagaacctagtaggcaaagaaatgtttttacatagtagctttccatgttggtcatctaatagccttagtttcatcatgtaatcatttagagctatattggccaaygttgctaattcatttcatgtcttgagaggaaaatgggtgtatgatattgctactattatgccaaatagactgcatcccacaggggcttcttagtattactatggtctgtataagcagccagtaaccttaaggaactgcagatctctgggatkcttggataacagtgagcgctgagaagaggcagtgggaaaygaaaactgtttagtaggtaaagaaagtccaagaattgttttagagtcaggttttttttattattattattagcagtattttccataagtattcgcctccttcatttat

SEQ ID NO: 95704 - DNA, 600 bp, Chicken  19866894618329_2
tctgctagtgacctacagcttgtcttctaagcatgcttacgtggagaacctagtaggcaaagaaatgtttttacatagtagctttccatgttggtcatctaatagccttagtttcatcatgtaatcatttagagctatattggccaaygttgctaattcatttcatgtcttgagaggaaaatgggtgtatgatattgctactattatgccaaatagactgcatcccacaggggcttcttagtattactatggtctgtataagcagccagtaaccttaaggaactgcagatctctgggatkcttggataacagtgagcgctgagaagaggcagtgggaaaygaaaactgtttagtaggtaaagaaagtccaagaattgttttagagtcaggttttttttattattattattagcagtattttccataagtattcgcctccttcatttataccaacaataaatctaccagctgtatggagcagtatgcattaagtgaactgatactttttatgcataggaattttgccatgtgatattttgtaaaataatgtgcaagaccttttctttctgcttttgtattagcattgctataatagatttc

SEQ ID NO: 95705 - DNA, 600 bp, Chicken  19866894618329_3
gtggagaacctagtaggcaaagaaatgtttttacatagtagctttccatgttggtcatctaatagccttagtttcatcatgtaatcatttagagctatattggccaaygttgctaattcatttcatgtcttgagaggaaaatgggtgtatgatattgctactattatgccaaatagactgcatcccacaggggcttcttagtattactatggtctgtataagcagccagtaaccttaaggaactgcagatctctgggatkcttggataacagtgagcgctgagaagaggcagtgggaaaygaaaactgtttagtaggtaaagaaagtccaagaattgttttagagtcaggttttttttattattattattagcagtattttccataagtattcgcctccttcatttataccaacaataaatctaccagctgtatggagcagtatgcattaagtgaactgatactttttatgcataggaattttgccatgtgatattttgtaaaataatgtgcaagaccttttctttctgcttttgtattagcattgctataatagatttctgtgacatctttgataactgacttacctatattctacatt

SEQ ID NO: 95706 - DNA, 599 bp, Chicken  19866894618336_1
  misc_feature (1)..(53): n is any nucleotide
nnnnnnnnnnnnnnnnnnnnnnnnnnnnnnnnnnnnnnnnnnnnnnnnnnnnnctgccctttggggaagctcagacaatgctgtgaagctcagagggaacatatgctgtcccacaccaatcaggacgtggcccagcaggattcctccccttggtgggagtgggtgatggctgaattcggggaaagcagcatcatttcctccccaccagaagagcagggagggacgaagcagtgctctgccaggcaaactctgccttcccacgggcgcagcaggaagacggcccctttggtgcccttctcrtggccaccctcccaccttctggtctcagcacatcacctctcccccgcctccctccccagctgcgctcccatcatcccaccgcagtgctgctgggaggggggggctgccccggtgtgggaaaccagggcggcagccaggaggcgtttcccgaaaatgtggggctgggaggggtcgaggccaaggggcagcgtgccctgggccagcaggaaatcctccctccccacgcacaaggcagcgccagcacccaacgcccgcctcattgggtttggctccggtgcggttcgttacccacggctggg

SEQ ID NO: 95707 - DNA, 599 bp, Chicken  19866894618337_1
  misc_feature (1)..(81): n is any nucleotide
nnnnnnnnnnnnnnnnnnnnnnnnnnnnnnnnnnnnnnnnnnnnnnnnnnnnnnnnnnnnnnnnnnnnnnnnnnnnnnnnnctggaagaaattaggtttgcagtttgaaatgcacgcattaagtatatatttagacatatataagaaatataaatgctataattacctgttggaaatgtgtatggattctactttggttttgattttcagttttgatttaggagtaaaagggaaaccccaagatctgtttcgtttcccttcttgcttagatgttcaagttataaagaacagcaaataaaytgtaagggartttatgttacacattcacaaggcaaaatatattccaaagttggacttggattcagaaattgttaccttgaattacttttctcaaaaatgttattgattcttcaatgactggaggactagaattcactgcagttgtttgtgagtcttgccagttttacagcatccttaaaaccatactaggctggtgattcactcaaattactgcaagttctaaaccttgtagagcttgatagtgcaaaaatgtagctgtggactttgctttaaggtgayggatttgctgtgtagaggct

SEQ ID NO: 95708 - DNA, 599 bp, Chicken  19866894618337_2
  misc_feature (1)..(71): n is any nucleotide
nnnnnnnnnnnnnnnnnnnnnnnnnnnnnnnnnnnnnnnnnnnnnnnnnnnnnnnnnnnnnnnnnnnnnnnctggaagaaattaggtttgcagtttgaaatgcacgcattaagtatatatttagacatatataagaaatataaatgctataattacctgttggaaatgtgtatggattctactttggttttgattttcagttttgatttaggagtaaaagggaaaccccaagatctgtttcgtttcccttcttgcttagatgttcaagttataaagaacagcaaataaaytgtaagggartttatgttacacattcacaaggcaaaatatattccaaagttggacttggattcagaaattgttaccttgaattacttttctcaaaaatgttattgattcttcaatgactggaggactagaattcactgcagttgtttgtgagtcttgccagttttacagcatccttaaaaccatactaggctggtgattcactcaaattactgcaagttctaaaccttgtagagcttgatagtgcaaaaatgtagctgtggactttgctttaaggtgayggatttgctgtgtagaggctctgttcattt

SEQ ID NO: 95709 - DNA, 600 bp, Chicken  19866894618337_3
tataaagaacagcaaataaaytgtaagggartttatgttacacattcacaaggcaaaatatattccaaagttggacttggattcagaaattgttaccttgaattacttttctcaaaaatgttattgattcttcaatgactggaggactagaattcactgcagttgtttgtgagtcttgccagttttacagcatccttaaaaccatactaggctggtgattcactcaaattactgcaagttctaaaccttgtagagcttgatagtgcaaaaatgtagctgtggactttgctttaaggtgayggatttgctgtgtagaggctctgttcatttttgcttgaggtgaactgggaaagcattgagtaactgtttgtcttgcatggggtcatgcaaaaccaaatgcgtttctgatgtaattcacgaactgatcccataatctgcttgtctggctttacaatttctaaggtttctaattccctgcgcaaacacaccagctgatgttttgagtcaaatagtgacacaggcttctgttttggaactcgggtaacagcctgacatgattactggtatcatttaggattaaaacccagagtttcagctagg

SEQ ID NO: 95710 - DNA, 600 bp, Chicken  19866894618362_1
atgcttgaatactgtggtgctaaatgttttagtaaagcatagtaaggaaaaaattataaaaagaatatgcagagccatgactttacaatgaagtagaccttctgtgatctgttgtccttcatgttctgcagcatgacgaaattgctgtgaagtcaggcctagccttctttaagacaagtaagccttctgaaaccccctttcctctcttcctgggagctgtttcatttttccacatctggtaatgccttatctggctgaatgtttacaacttaaactcatattttcctcatttgtctcccktgattgttctagatttagaaattgtttcctttgttgccaggatgttcgtgtaaggtcttrctgcaaatgtgctcaggcggagaaggccgagagcagaagcttgcagactgtctcatgtttggaatgacataagccaccctccggagtgtcctcttgggagctgcgcttaggaaggaaatggcgtggaaggccgtgtaggagtgtgagaacagcgctgcaatggttggaatgcaggataggcatcacttgggtgggctcggttttcctctgcttttcagcagtgctgggtgccaagtttga

SEQ ID NO: 95711 - DNA, 600 bp, Chicken  19866894618362_2
aagaatatgcagagccatgactttacaatgaagtagaccttctgtgatctgttgtccttcatgttctgcagcatgacgaaattgctgtgaagtcaggcctagccttctttaagacaagtaagccttctgaaaccccctttcctctcttcctgggagctgtttcatttttccacatctggtaatgccttatctggctgaatgtttacaacttaaactcatattttcctcatttgtctcccktgattgttctagatttagaaattgtttcctttgttgccaggatgttcgtgtaaggtcttrctgcaaatgtgctcaggcggagaaggccgagagcagaagcttgcagactgtctcatgtttggaatgacataagccaccctccggagtgtcctcttgggagctgcgcttaggaaggaaatggcgtggaaggccgtgtaggagtgtgagaacagcgctgcaatggttggaatgcaggataggcatcacttgggtgggctcggttttcctctgcttttcagcagtgctgggtgccaagtttgaggaagactgctgtgcagagttgaagaagctggaatgtgttcttcagttgaggtgaatgca

SEQ ID NO: 95712 - DNA, 599 bp, Chicken  19866894618369_1
  misc_feature (1)..(177): n is any nucleotide
nnnnnnnnnnnnnnnnnnnnnnnnnnnnnnnnnnnnnnnnnnnnnnnnnnnnnnnnnnnnnnnnnnnnnnnnnnnnnnnnnnnnnnnnnnnnnnnnnnnnnnnnnnnnnnnnnnnnnnnnnnnnnnnnnnnnnnnnnnnnnnnnnnnnnnnnnnnnnnnnnnnnnnnnnnnnnnnnntaactatattgaactgtaagtgtagcattccctaaagatttagagaacatccttcaagcaacgtgttagtagtcagtgccaggtcttttgacacagctttgctttcctcttaaaaaaggaaaratgttgcattttattgtattatgaatttttttagtgtttgaactactgcttctataaatgctctattagcaatatttgtttaaaaaagggacagcttgtgcaaaccttaggaagaggattaagggatatttccaccaagatgacagtgttttccagagaaggaaagttgggcagagggaggaaaattgccatttctcttgaaaaaaattattgaatggatttgttggctggcaaatcaagtgcagaaaatctcaaaggatcatagaatggtttgtgttggaatggacctttaagatcat

SEQ ID NO: 95713 - DNA, 600 bp, Chicken  19866894618371_1
aggttaggagcaccagcttgtaatgctctgagttgtaaatgtcagtagcaaaatgagggacacagagagcatttgaggttaagtgtctttcaccctctgagtaggcaaattacttacagaatctctctctggagtttgtgtgcaactccaagtacacatgctctagcttacccactatccaccaacttatggctcaatttgttaaatggaaatagctgattagacagtaatgagcagagagtagatggtttttcctcttcccctaccctcacacaactcttagtaaacaatctcctgctrcaacaagaactagatttttacaaatgaagaaagaaaaagaaaccaaagcaaaactctgctactttatcttgtggttgaaactctctcagtaccaagatacttcactgagttttcttctttgaatagttggtgttagcaaagaatagatggctctgggcagcctggtctactggctggcagccctgcacatagcggggtggttgaaaggtcagtttggaccttttcaacccaggccattctatgattatatcctgatacaaaatgaagaaaaatgaataatcaatacttaaattttctggg

SEQ ID NO: 95714 - DNA, 600 bp, Chicken  19866894618380_1
ctttgaaagtgatggagcctcctgtaaagattgagatattccaggaaaaaaaacttgctaatattgctgcttctgccagagctgaacttgtttcttttcttttcgtgtgtgtgtgtgtgtatgtgagatgagttgccagttcaggttatcttcttcgaaggaaggaccaaaagcattagtccttccataaacaaaatcagaataaacagcacaaaatctggggtgtttttccttgctttgcagtgagggagatgcataacaaaaccatcagcagactggttctgtcagcagtagaactgkgaactggattagattctcactttcatctctccagtcctgtctgggatttggtcaagtagaaatgacaacaaaaatattttgttttcagcttctttttttgcctgttgaggaaagcagatcccttggtttgcttgtcagtgatacctgaaagagtgaatgtgatttgagggttagctgagaaaagtgttttccattgaaaattggaataggccttatctgaacaacagtgctaacaaacagctgaactgtcccaggtttgtttcttacatggactttctgaagaactggaagcagcacagc

SEQ ID NO: 95715 - DNA, 600 bp, Chicken  19866894618385_1
tccttcatttcccagtgggaagactatcttatttttttggatatatttaagatacacaagttacatgaccgagttacatgaatatccacgcttaccttctttaaaaggagtttttggaggaatattttccttgctatcatgctggaatgctttagaaggatcaaagtgcctaatgccctgaattgtatatagttgctcctgcagatctctgtttgtttgtttctcttttgcaagaagtgcacgcagttttgagatgtcctgaagaaaacaatactcagaagttagattaaaaaaagaagkaaagatgcctctgtatattgtgtatccaacaccaacagatgcccttgctgttctggagactgatgacttactctaatgcagctcatgcagggaaattaacaactatggaaagcagtgagtttgcagaattagcctccaagtatctgcaggatttagcagaagaaagcaatcaagcaagcaactgaattctccattttttgacttcttatttgacaaacctgctgcaggtgggtattatcttctttcaacttcataacatgcttgattttttgtttctggttttggtggccaagtagttta

SEQ ID NO: 95716 - DNA, 599 bp, Chicken  19866894618390_1
  misc_feature (1)..(123): n is any nucleotide
nnnnnnnnnnnnnnnnnnnnnnnnnnnnnnnnnnnnnnnnnnnnnnnnnnnnnnnnnnnnnnnnnnnnnnnnnnnnnnnnnnnnnnnnnnnnnnnnnnnnnnnnnnnnnnnnnnnnnnnnnnncaaggcagaaaatagaaaggtttgagccttctttagattcctgagtaggtgaagggggcctggcgctgcaaaaatcctgcacatctacttcagaagtaaaatgatggagctcagctggagtaaactcaggttccagagaaatgggtgggcatgaagctctcaggtcttctgagcaaygtggtgtctcggtcattctgtcctcagggattattctattagagtcagcagtcagaaaaacacagctgtcctgcttggaagcagcagaccatctagcaacctgaccattttcagagttagtggcargagaaggcacttttccttggttgtcagatgaagaataaagtactgtggatgatatcccatgcttattattgctttcaactttggaagaaatattaatatgtctactttcacaactaggtggagatgcrgaaatgatgtcwayatcaatgtctttttcacagatggtagagaaa

SEQ ID NO: 95717 - DNA, 600 bp, Chicken  19866894618390_2
ggcagaaaatagaaaggtttgagccttctttagattcctgagtaggtgaagggggcctggcgctgcaaaaatcctgcacatctacttcagaagtaaaatgatggagctcagctggagtaaactcaggttccagagaaatgggtgggcatgaagctctcaggtcttctgagcaaygtggtgtctcggtcattctgtcctcagggattattctattagagtcagcagtcagaaaaacacagctgtcctgcttggaagcagcagaccatctagcaacctgaccattttcagagttagtggcargagaaggcacttttccttggttgtcagatgaagaataaagtactgtggatgatatcccatgcttattattgctttcaactttggaagaaatattaatatgtctactttcacaactaggtggagatgcrgaaatgatgtcwayatcaatgtctttttcacagatggtagagaaatggtcagtcaaaggtttaccttcgcatctcagggcagaataagaaacttccagatttttttcttgtgatttagaaatgtgaggggaaagttcagaaatacaattcttagattcaaaaggagtaagag

SEQ ID NO: 95718 - DNA, 600 bp, Chicken  19866894618390_3
tccagagaaatgggtgggcatgaagctctcaggtcttctgagcaaygtggtgtctcggtcattctgtcctcagggattattctattagagtcagcagtcagaaaaacacagctgtcctgcttggaagcagcagaccatctagcaacctgaccattttcagagttagtggcargagaaggcacttttccttggttgtcagatgaagaataaagtactgtggatgatatcccatgcttattattgctttcaactttggaagaaatattaatatgtctactttcacaactaggtggagatgcrgaaatgatgtcwayatcaatgtctttttcacagatggtagagaaatggtcagtcaaaggtttaccttcgcatctcagggcagaataagaaacttccagatttttttcttgtgatttagaaatgtgaggggaaagttcagaaatacaattcttagattcaaaaggagtaagagccatctcattcataccagcctcactgattttagaagcagcaggtgtaggatcatctgtcctttcagtgctgtctaaagggaaaggtgaagacttygatgtgttatcttctgcaagcgtaactaatgtt

SEQ ID NO: 95719 - DNA, 600 bp, Chicken  19866894618390_4
ggtgggcatgaagctctcaggtcttctgagcaaygtggtgtctcggtcattctgtcctcagggattattctattagagtcagcagtcagaaaaacacagctgtcctgcttggaagcagcagaccatctagcaacctgaccattttcagagttagtggcargagaaggcacttttccttggttgtcagatgaagaataaagtactgtggatgatatcccatgcttattattgctttcaactttggaagaaatattaatatgtctactttcacaactaggtggagatgcrgaaatgatgtcwayatcaatgtctttttcacagatggtagagaaatggtcagtcaaaggtttaccttcgcatctcagggcagaataagaaacttccagatttttttcttgtgatttagaaatgtgaggggaaagttcagaaatacaattcttagattcaaaaggagtaagagccatctcattcataccagcctcactgattttagaagcagcaggtgtaggatcatctgtcctttcagtgctgtctaaagggaaaggtgaagacttygatgtgttatcttctgcaagcgtaactaatgttttttcaggaatg

SEQ ID NO: 95720 - DNA, 600 bp, Chicken  19866894618390_5
tgggcatgaagctctcaggtcttctgagcaaygtggtgtctcggtcattctgtcctcagggattattctattagagtcagcagtcagaaaaacacagctgtcctgcttggaagcagcagaccatctagcaacctgaccattttcagagttagtggcargagaaggcacttttccttggttgtcagatgaagaataaagtactgtggatgatatcccatgcttattattgctttcaactttggaagaaatattaatatgtctactttcacaactaggtggagatgcrgaaatgatgtcwayatcaatgtctttttcacagatggtagagaaatggtcagtcaaaggtttaccttcgcatctcagggcagaataagaaacttccagatttttttcttgtgatttagaaatgtgaggggaaagttcagaaatacaattcttagattcaaaaggagtaagagccatctcattcataccagcctcactgattttagaagcagcaggtgtaggatcatctgtcctttcagtgctgtctaaagggaaaggtgaagacttygatgtgttatcttctgcaagcgtaactaatgttttttcaggaatgtc

SEQ ID NO: 95721 - DNA, 600 bp, Chicken  19866894618390_6
atatgtctactttcacaactaggtggagatgcrgaaatgatgtcwayatcaatgtctttttcacagatggtagagaaatggtcagtcaaaggtttaccttcgcatctcagggcagaataagaaacttccagatttttttcttgtgatttagaaatgtgaggggaaagttcagaaatacaattcttagattcaaaaggagtaagagccatctcattcataccagcctcactgattttagaagcagcaggtgtaggatcatctgtcctttcagtgctgtctaaagggaaaggtgaagacttygatgtgttatcttctgcaagcgtaactaatgttttttcaggaatgtcttgcacagttttatgggaaacagtaccatgagtaggaatggaattttctgagaggctcatatctacagtctcaaaggatttgctcttttcatattcaagatcaggagtagaaacagcgtctctcttatcttttgtgccaactcctcttttcactatagttttacttacagatttgcaatcaggataaagagaagctgagtaacagtcacccgtttcaaatgaagactcaaaactaacagagagagttgctgtc

SEQ ID NO: 95722 - DNA, 599 bp, Chicken  19866894618392_1
  misc_feature (1)..(5): n is any nucleotide
nnnnncaccagtgagcacttgctcctgcacactgcacaacattgccgagtctcatgtcatacacaaggtgtgccttccccagcacagtctgatcagtgtattgtgcataattaattgtctttttttctggaaataagcacaacagaacccaaaccaatacctctttcacttaccaggtccttttgctttaatacttgctatgtgtagagagaagtgcctaactgaaaatcagtaagctaaatttaaaactcagggttacaaggctttgtgcactcactttcttttcccaaacgtccaaaygtttccctttcctccaacgtgttttgcatcataaattctaattgcattttgaaaaaggcaatactcatctcggtctttacataagacaataaattcactacttacasctgtagcacttcctccctcgatcagtatcataagacagagatttctgtgtaggccactggagttgcagtaacaaagattcagggcaaagccccgtggagggaactgcaaagctctttgaaacacctatgctaagagtttcttactggtgaaattttactggtttccagtaaaacgtgctgaaaaattaatta

SEQ ID NO: 95723 - DNA, 600 bp, Chicken  19866894618392_2
taattaattgtctttttttctggaaataagcacaacagaacccaaaccaatacctctttcacttaccaggtccttttgctttaatacttgctatgtgtagagagaagtgcctaactgaaaatcagtaagctaaatttaaaactcagggttacaaggctttgtgcactcactttcttttcccaaacgtccaaaygtttccctttcctccaacgtgttttgcatcataaattctaattgcattttgaaaaaggcaatactcatctcggtctttacataagacaataaattcactacttacasctgtagcacttcctccctcgatcagtatcataagacagagatttctgtgtaggccactggagttgcagtaacaaagattcagggcaaagccccgtggagggaactgcaaagctctttgaaacacctatgctaagagtttcttactggtgaaattttactggtttccagtaaaacgtgctgaaaaattaattactcatttcaactggctagcagctagagcgagcataccaaaacaaggcacaagtgacatgacaggctcccgttaagtctaagagttaaagatcctgaatggagaaccat

SEQ ID NO: 95724 - DNA, 600 bp, Chicken  19866894618411_1
ggaaaaaattctggaatggtttcatgtcacatctctttgggtttctccagcacagatatctccagaggagccaattagcctcggtttcctttgcagccagtggaaagaaatagaaattttctgtagtgaaattcacctgatctattgttgtcacctactttaggatgagattgattttgccctcagctccatccaatactctgagatcctcactgcctgaaagggaatatatagcaactagggctgatgtaaatgtctgcatttagcccagtgagtcccattccagatgcccagcacacrggccaaaatgctgccacrccaattcctaatgcccacagcacctacactcattgagtctgggcttattatttaatgggagatcaaaccataatgacttgaacaaaatataccatgaataaaggtgaggaaaaagtgtcctgctacagcaggagcatcacaatggyagcaacattgtggtatgtcttatagataccgctgtctcatattgaatataattatgtgtaaaargaaattaacacaacagaagcactgtaaaatagatttgtatcaagctgattattgtaagagtttgaggacagc

SEQ ID NO: 95725 - DNA, 600 bp, Chicken  19866894618411_2
gtttcatgtcacatctctttgggtttctccagcacagatatctccagaggagccaattagcctcggtttcctttgcagccagtggaaagaaatagaaattttctgtagtgaaattcacctgatctattgttgtcacctactttaggatgagattgattttgccctcagctccatccaatactctgagatcctcactgcctgaaagggaatatatagcaactagggctgatgtaaatgtctgcatttagcccagtgagtcccattccagatgcccagcacacrggccaaaatgctgccacrccaattcctaatgcccacagcacctacactcattgagtctgggcttattatttaatgggagatcaaaccataatgacttgaacaaaatataccatgaataaaggtgaggaaaaagtgtcctgctacagcaggagcatcacaatggyagcaacattgtggtatgtcttatagataccgctgtctcatattgaatataattatgtgtaaaargaaattaacacaacagaagcactgtaaaatagatttgtatcaagctgattattgtaagagtttgaggacagccagcaagcagcagagaaa

SEQ ID NO: 95726 - DNA, 487 bp, Chicken  19866894618411_3
atgagattgattttgccctcagctccatccaatactctgagatcctcactgcctgaaagggaatatatagcaactagggctgatgtaaatgtctgcatttagcccagtgagtcccattccagatgcccagcacacrggccaaaatgctgccacrccaattcctaatgcccacagcacctacactcattgagtctgggcttattatttaatgggagatcaaaccataatgacttgaacaaaatataccatgaataaaggtgaggaaaaagtgtcctgctacagcaggagcatcacaatggyagcaacattgtggtatgtcttatagataccgctgtctcatattgaatataattatgtgtaaaargaaattaacacaacagaagcactgtaaaatagatttgtatcaagctgattattgtaagagtttgaggacagccagcaagcagcagagaaaatggctgggacttaagaagaagaaattaagagg

SEQ ID NO: 95727 - DNA, 423 bp, Chicken  19866894618411_4
atatagcaactagggctgatgtaaatgtctgcatttagcccagtgagtcccattccagatgcccagcacacrggccaaaatgctgccacrccaattcctaatgcccacagcacctacactcattgagtctgggcttattatttaatgggagatcaaaccataatgacttgaacaaaatataccatgaataaaggtgaggaaaaagtgtcctgctacagcaggagcatcacaatggyagcaacattgtggtatgtcttatagataccgctgtctcatattgaatataattatgtgtaaaargaaattaacacaacagaagcactgtaaaatagatttgtatcaagctgattattgtaagagtttgaggacagccagcaagcagcagagaaaatggctgggacttaagaagaagaaattaagagg

SEQ ID NO: 95728 - DNA, 600 bp, Chicken  19866894618414_1
tattgttgtgtagacttatgctgctaagtctacttactaagtctgctgctaacctaaaatcaaacagagttgttaatcaaatagctatttaaagacaaatcaattattaagggaaatgaatttgctccataattttagaatctgctctttccagcataatccaattaagtaacacctcactgggaacagcaaacagcatgatattctctagctggaattctcaaagatgtttaccatcagaacataacttaaagacaaaagtttcagcccagtaaaattatataattgaagcaaagatcrctaataatggctctccagaccttttctaaagcagattttatttttggattgtttttcttttataaaattgttttatagacattttaatttcatatctatggtggcactctgtagacatacccatgaaaactgtcagtcttctgctgtgaaagattaaaacctaagatagataaggtgttctataagaagtgtatttttccttttaagttgtttaccactgtcactaggaaagacaatgtcattatgaaaagagctgcagggaaagctgacaccaagataacactgatcactgtcatgtgt

SEQ ID NO: 95729 - DNA, 600 bp, Chicken  19866894618414_2
tttcttttataaaattgttttatagacattttaatttcatatctatggtggcactctgtagacatacccatgaaaactgtcagtcttctgctgtgaaagattaaaacctaagatagataaggtgttctataagaagtgtatttttccttttaagttgtttaccactgtcactaggaaagacaatgtcattatgaaaagagctgcagggaaagctgacaccaagataacactgatcactgtcatgtgtttgggtatactctgtgtgaaaggagatgttagatgtttttctaacgagaaagraagcagtgagactggccaaagtggtatttacagttgtaatgaaaaagttggagatatattttaaaacaaacaagtccagagtgtaaccatgctctgggactggatctaactgggagcttcaggggctgggatctagggccttcaccagcctcyagaaggacagctttggctgagttcatctggcatgcayggtgcattgctactgtgtctgtacaacttctaatgactcaagaccactttgtcactggaggaaggaatacactggagtttgccttcattcagcttgacaaagtgatggga

SEQ ID NO: 95730 - DNA, 600 bp, Chicken  19866894618414_3
gttgtttaccactgtcactaggaaagacaatgtcattatgaaaagagctgcagggaaagctgacaccaagataacactgatcactgtcatgtgtttgggtatactctgtgtgaaaggagatgttagatgtttttctaacgagaaagraagcagtgagactggccaaagtggtatttacagttgtaatgaaaaagttggagatatattttaaaacaaacaagtccagagtgtaaccatgctctgggactggatctaactgggagcttcaggggctgggatctagggccttcaccagcctcyagaaggacagctttggctgagttcatctggcatgcayggtgcattgctactgtgtctgtacaacttctaatgactcaagaccactttgtcactggaggaaggaatacactggagtttgccttcattcagcttgacaaagtgatgggatatctctcttacatgataatacttgtcagttgtatcagatttggcaagacaagcagcgatgccaccctcagaatgtaactcagctgacgtttaaagtgtgtgggtataccattgcaaaagggcttaatttcatgtgctgtatgcaaatatgct

SEQ ID NO: 95731 - DNA, 600 bp, Chicken  19866894618414_4
atgaaaagagctgcagggaaagctgacaccaagataacactgatcactgtcatgtgtttgggtatactctgtgtgaaaggagatgttagatgtttttctaacgagaaagraagcagtgagactggccaaagtggtatttacagttgtaatgaaaaagttggagatatattttaaaacaaacaagtccagagtgtaaccatgctctgggactggatctaactgggagcttcaggggctgggatctagggccttcaccagcctcyagaaggacagctttggctgagttcatctggcatgcayggtgcattgctactgtgtctgtacaacttctaatgactcaagaccactttgtcactggaggaaggaatacactggagtttgccttcattcagcttgacaaagtgatgggatatctctcttacatgataatacttgtcagttgtatcagatttggcaagacaagcagcgatgccaccctcagaatgtaactcagctgacgtttaaagtgtgtgggtataccattgcaaaagggcttaatttcatgtgctgtatgcaaatatgctctcttttgcctttatttctgtggtgctctctcagctg

SEQ ID NO: 95732 - DNA, 599 bp, Chicken  19866894618424_1
  misc_feature (1)..(118): n is any nucleotide
nnnnnnnnnnnnnnnnnnnnnnnnnnnnnnnnnnnnnnnnnnnnnnnnnnnnnnnnnnnnnnnnnnnnnnnnnnnnnnnnnnnnnnnnnnnnnnnnnnnnnnnnnnnnnnnnnnnnnncctcatccggctcgactggcacgggcttctctcccagctgcatggagtacatcaggtccaccacttgttcccagctaaatggaggggtcacataagggaaaataaaggatcagcgcttggtctgcctatgtgattcctgccttagcctggtgtagaggtgccaacggtgcccgagggctgtrggaacagcactgggaggactggtgtcaccccgcaggctattgggatagcggggatggctgtctggggggagccaaggggttggaatggttgggtcacacatcctctctaggtctcactgcacggcagcgggatgcagcagcgtaggccttacctggccgcaggtttgtaatccgttccaaaggtctgctgttgctgctggatcctctccaccggcaccaacttatctcccccatctccgaaccgctgcgccaggacccagccctcctccagctcacggcagaccccgtgctcctccagg

SEQ ID NO: 95733 - DNA, 599 bp, Chicken  19866894618428_1
  misc_feature (1)..(110): n is any nucleotide
nnnnnnnnnnnnnnnnnnnnnnnnnnnnnnnnnnnnnnnnnnnnnnnnnnnnnnnnnnnnnnnnnnnnnnnnnnnnnnnnnnnnnnnnnnnnnnnnnnnnnnnnnnnnnngaagtgggaaaatgtagatgcagagagttcactgaagaattaaagcctttctacagcacagttacatacaacagaaggaaggtgttaaattattactggtgttcatacacatatttaactgaattgtaaattaaactatgtccagagccaggtaactcttctctgagcaacaacctcatgactctaaacktatttcctaataattttttccatctgrgattacaaacacttatcccctaaaatcatgaccctgcataaattagagctcaactgttgcaatgactaaggaccacccacatttcacagacctctcccttccctccaggacagaaatactgtagtttatacttccattgtttaacatatctatgtgattttagttcaattctggattaattttaaacttgagtgttgtgcctctaaaccactgcatagattagattatgatcagccaactcctcttgatgactattgcttttcctttgaaaa

SEQ ID NO: 95734 - DNA, 599 bp, Chicken  19866894618428_2
  misc_feature (1)..(83): n is any nucleotide
nnnnnnnnnnnnnnnnnnnnnnnnnnnnnnnnnnnnnnnnnnnnnnnnnnnnnnnnnnnnnnnnnnnnnnnnnnnnnnnnnnngaagtgggaaaatgtagatgcagagagttcactgaagaattaaagcctttctacagcacagttacatacaacagaaggaaggtgttaaattattactggtgttcatacacatatttaactgaattgtaaattaaactatgtccagagccaggtaactcttctctgagcaacaacctcatgactctaaacktatttcctaataattttttccatctgrgattacaaacacttatcccctaaaatcatgaccctgcataaattagagctcaactgttgcaatgactaaggaccacccacatttcacagacctctcccttccctccaggacagaaatactgtagtttatacttccattgtttaacatatctatgtgattttagttcaattctggattaattttaaacttgagtgttgtgcctctaaaccactgcatagattagattatgatcagccaactcctcttgatgactattgcttttcctttgaaaaacaatgcacataaaagccaataatctg

SEQ ID NO: 95735 - DNA, 600 bp, Chicken  19866894618440_1
gaattgcaccagaggggaaaagacttatgcagcagcttggatccatgacatggaccaagcaaaagagattcagatgagggcctctgagaaccaaagtgactggcctatcctccagggttttccaagttgcgtgcctcacaatcttctcttgcaattgtttcacatcatatacataacttaatattcactagagaagcagcttgaacaggcctcgtttcctcaccaagagccccacctatctgattataagttgttctcaggttgaggtttctgttgctctgaaaagcttttggatggctyggtgattaactggagaattttaaattttgaaaatgctcttgggatgaggaaaatatttcctcctcatttcgggtagcaagcargcatagtaaagggacaaaattacagatggaaaagtgtcaggcagagaaaactgctcagtcatgcagttctaaagcaatactayagttcacattttgcctattatgtaacacagatataaacaggcaagagtattgtgtttgcacttgatgagtaagactgaactgataatgcacaattatattcattttggtacaaaatagaaataaaagaaaagaa

SEQ ID NO: 95736 - DNA, 600 bp, Chicken  19866894618440_2
ctgagaaccaaagtgactggcctatcctccagggttttccaagttgcgtgcctcacaatcttctcttgcaattgtttcacatcatatacataacttaatattcactagagaagcagcttgaacaggcctcgtttcctcaccaagagccccacctatctgattataagttgttctcaggttgaggtttctgttgctctgaaaagcttttggatggctyggtgattaactggagaattttaaattttgaaaatgctcttgggatgaggaaaatatttcctcctcatttcgggtagcaagcargcatagtaaagggacaaaattacagatggaaaagtgtcaggcagagaaaactgctcagtcatgcagttctaaagcaatactayagttcacattttgcctattatgtaacacagatataaacaggcaagagtattgtgtttgcacttgatgagtaagactgaactgataatgcacaattatattcattttggtacaaaatagaaataaaagaaaagaacttttttcttactaggtaagaaaggtagctaggtaaaagaaactacagtctgtggtttgcattctagtcatctaagtgctcta

SEQ ID NO: 95737 - DNA, 551 bp, Chicken  19866894618440_3
atatacataacttaatattcactagagaagcagcttgaacaggcctcgtttcctcaccaagagccccacctatctgattataagttgttctcaggttgaggtttctgttgctctgaaaagcttttggatggctyggtgattaactggagaattttaaattttgaaaatgctcttgggatgaggaaaatatttcctcctcatttcgggtagcaagcargcatagtaaagggacaaaattacagatggaaaagtgtcaggcagagaaaactgctcagtcatgcagttctaaagcaatactayagttcacattttgcctattatgtaacacagatataaacaggcaagagtattgtgtttgcacttgatgagtaagactgaactgataatgcacaattatattcattttggtacaaaatagaaataaaagaaaagaacttttttcttactaggtaagaaaggtagctaggtaaaagaaactacagtctgtggtttgcattctagtcatctaagtgctctacactgcaagcttagagctaagagtctggaacacg

SEQ ID NO: 95738 - DNA, 599 bp, Chicken  19866894618455_1
  misc_feature (1)..(180): n is any nucleotide
nnnnnnnnnnnnnnnnnnnnnnnnnnnnnnnnnnnnnnnnnnnnnnnnnnnnnnnnnnnnnnnnnnnnnnnnnnnnnnnnnnnnnnnnnnnnnnnnnnnnnnnnnnnnnnnnnnnnnnnnnnnnnnnnnnnnnnnnnnnnnnnnnnnnnnnnnnnnnnnnnnnnnnnnnnnnnnnnnnnntgtccaaatcatgaatccatacggactgaaatacagcagtttacgttgtgtctgcacttcaccagaaagactgacatcccgtatttgtaagcgactgatgatgcttattgattgtcctaracagcgtgggcttcatcttggtgtagtgccagtcttgttttacagtcaaggcagtaactgctccctagaattcactgcttgctatttcagtaccaaatggcaaactggaagagtggcaggttactgccctgctttgtgtatgtgtttgattatggagcgwagcgatctggcatctttcttccaaatttcaaactgaggtttttaatcttaatcggagcactggtgtgcaaaggtagattttctgacctttgtgagcttgtgtcagatattagcaacatctgaaaattactgttgaattt

SEQ ID NO: 95739 - DNA, 599 bp, Chicken  19866894618455_2
  misc_feature (1)..(20): n is any nucleotide
nnnnnnnnnnnnnnnnnnnntgtccaaatcatgaatccatacggactgaaatacagcagtttacgttgtgtctgcacttcaccagaaagactgacatcccgtatttgtaagcgactgatgatgcttattgattgtcctaracagcgtgggcttcatcttggtgtagtgccagtcttgttttacagtcaaggcagtaactgctccctagaattcactgcttgctatttcagtaccaaatggcaaactggaagagtggcaggttactgccctgctttgtgtatgtgtttgattatggagcgwagcgatctggcatctttcttccaaatttcaaactgaggtttttaatcttaatcggagcactggtgtgcaaaggtagattttctgacctttgtgagcttgtgtcagatattagcaacatctgaaaattactgttgaatttggtagaaaaatctggttaacctacagtctgcaaacataataaatgcaatcttcgtagttacagtgaagtgaattaggtgtttattctaatatttactctgcctttgagctagttcagaacacactttcaactgataaaatgttctaggctgcagactagc

SEQ ID NO: 95740 - DNA, 470 bp, Chicken  19866894618486_1
gctagcagaactcagcacagcctgtttctcagctaaacagcatggccaggctgatgggctgcacctgtgccccaagccaccagcagtgccccacaggtgtgctgcaggcagggctgctcctgctgcagggatggagagccactggctttggtgtgagagctggatcgaggcttggtgcaaaggtaaggcagcctgaaatggtaacgtgctcaagttttacttctgaaacaaggctgttgaacccgaggttactgaggtactgtggatgattttgtacgttagaggaaagttgtactgcartggttggagaagagctctggagctgtgtttattcttttgtcagtcttaatgcattaatgctaatttgagagactgcaagtgcgagtgttgcagatgctgaaatggagagaatacttcagctagcatatggaaagtatttacaggctttacacaatggtgatatataggag

SEQ ID NO: 95741 - DNA, 600 bp, Chicken  19866894618488_1
tgtaggaccactcagcaggatcactcagtgatcatggaggacagtgctgttaagtgcaactgtgcagttacaatgcaagtcatttactgtgtgctacttattagacctccaaaagtgcaagggtcttaaattcaacagtgtgtttttatgggtaatataatatccataggcttgccagtctctgcttctcaagtttgtactactttacatttaaactgctattttacatgtaaacccttgcatgtaaaaagtgatgagagcttctactcttctgtaccctggatttaatgttcgcgcatytgaaaatcatttaatttcttgktatctcagttcttccatcagtgataaacactaatcccctctcagtaagtgtgctgaggctgtggggaggaggattgttttccagctaataagctgctgaagcacacagcactcagaatctgcttcctgtctcccctggacacagcaccctgctctgcagactgggggaagcagtaggtagaccctgcatccccatggggtgccaacactatgtttgtgttggcagcttttcaagcaactgcattccaccatagaacttggagaaaaatcttccttcca

SEQ ID NO: 95742 - DNA, 600 bp, Chicken  19866894618488_2
actcagtgatcatggaggacagtgctgttaagtgcaactgtgcagttacaatgcaagtcatttactgtgtgctacttattagacctccaaaagtgcaagggtcttaaattcaacagtgtgtttttatgggtaatataatatccataggcttgccagtctctgcttctcaagtttgtactactttacatttaaactgctattttacatgtaaacccttgcatgtaaaaagtgatgagagcttctactcttctgtaccctggatttaatgttcgcgcatytgaaaatcatttaatttcttgktatctcagttcttccatcagtgataaacactaatcccctctcagtaagtgtgctgaggctgtggggaggaggattgttttccagctaataagctgctgaagcacacagcactcagaatctgcttcctgtctcccctggacacagcaccctgctctgcagactgggggaagcagtaggtagaccctgcatccccatggggtgccaacactatgtttgtgttggcagcttttcaagcaactgcattccaccatagaacttggagaaaaatcttccttccagaagtgataacccaaagggaca

SEQ ID NO: 95743 - DNA, 599 bp, Chicken  19866894618491_1
  misc_feature (1)..(154): n is any nucleotide
nnnnnnnnnnnnnnnnnnnnnnnnnnnnnnnnnnnnnnnnnnnnnnnnnnnnnnnnnnnnnnnnnnnnnnnnnnnnnnnnnnnnnnnnnnnnnnnnnnnnnnnnnnnnnnnnnnnnnnnnnnnnnnnnnnnnnnnnnnnnnnnnnnnnnnnnnnttgattttgcacatctatagaggagctagtacttctcagtactcaatccctcaaatggaacacgagctaactttctcctctagctgggcagaaaaacatgtctagatcttttttgctttgaagaattttgatggcgttgtttcccrtaagcttattttacctgtgaaacaaaattcattaagaactttgtcctacttttaaatgactgcattttagttgaattgcattagatccatcttcctgacttctacattggtttgttttstggaagctggcctcctatgccctgcactgtagcagccagctgactgaagcggagttgggactcttctgcatctccatcttgtggacggaagaggcaaagacttttagagtaaatattttctcacttcatattcctcttaggtcccagtcagaatgttttgtcccattgtrtgatgtagat

SEQ ID NO: 95744 - DNA, 599 bp, Chicken  19866894618491_2
  misc_feature (1)..(35): n is any nucleotide
nnnnnnnnnnnnnnnnnnnnnnnnnnnnnnnnnnnttgattttgcacatctatagaggagctagtacttctcagtactcaatccctcaaatggaacacgagctaactttctcctctagctgggcagaaaaacatgtctagatcttttttgctttgaagaattttgatggcgttgtttcccrtaagcttattttacctgtgaaacaaaattcattaagaactttgtcctacttttaaatgactgcattttagttgaattgcattagatccatcttcctgacttctacattggtttgttttstggaagctggcctcctatgccctgcactgtagcagccagctgactgaagcggagttgggactcttctgcatctccatcttgtggacggaagaggcaaagacttttagagtaaatattttctcacttcatattcctcttaggtcccagtcagaatgttttgtcccattgtrtgatgtagatggtttggaatctaccagtgaattaattcaacttggagatactgctyattcattctcagagagaggggaaggtaagcttggataaatatatatttttaagactaatctgtagtagcattt

SEQ ID NO: 95745 - DNA, 600 bp, Chicken  19866894618491_3
gttgtttcccrtaagcttattttacctgtgaaacaaaattcattaagaactttgtcctacttttaaatgactgcattttagttgaattgcattagatccatcttcctgacttctacattggtttgttttstggaagctggcctcctatgccctgcactgtagcagccagctgactgaagcggagttgggactcttctgcatctccatcttgtggacggaagaggcaaagacttttagagtaaatattttctcacttcatattcctcttaggtcccagtcagaatgttttgtcccattgtrtgatgtagatggtttggaatctaccagtgaattaattcaacttggagatactgctyattcattctcagagagaggggaaggtaagcttggataaatatatatttttaagactaatctgtagtagcatttctatagatagcaaaattgttatctgctttgctgtttgctctaaaacacttcagcagtttaaatgtgtcaatgaataaaagtaaataagtcacaaaaytcaaattctgcttcttttgaaactccactcaaatttaagtatctatgctgttaagtcatacctatgcaaatcca

SEQ ID NO: 95746 - DNA, 600 bp, Chicken  19866894618491_4
ctacttttaaatgactgcattttagttgaattgcattagatccatcttcctgacttctacattggtttgttttstggaagctggcctcctatgccctgcactgtagcagccagctgactgaagcggagttgggactcttctgcatctccatcttgtggacggaagaggcaaagacttttagagtaaatattttctcacttcatattcctcttaggtcccagtcagaatgttttgtcccattgtrtgatgtagatggtttggaatctaccagtgaattaattcaacttggagatactgctyattcattctcagagagaggggaaggtaagcttggataaatatatatttttaagactaatctgtagtagcatttctatagatagcaaaattgttatctgctttgctgtttgctctaaaacacttcagcagtttaaatgtgtcaatgaataaaagtaaataagtcacaaaaytcaaattctgcttcttttgaaactccactcaaatttaagtatctatgctgttaagtcatacctatgcaaatccagaaatacagatttattaaaacaactgatgcgtaggctcaaggtagccctatgttta

SEQ ID NO: 95747 - DNA, 572 bp, Chicken  19866894618491_5
aagacttttagagtaaatattttctcacttcatattcctcttaggtcccagtcagaatgttttgtcccattgtrtgatgtagatggtttggaatctaccagtgaattaattcaacttggagatactgctyattcattctcagagagaggggaaggtaagcttggataaatatatatttttaagactaatctgtagtagcatttctatagatagcaaaattgttatctgctttgctgtttgctctaaaacacttcagcagtttaaatgtgtcaatgaataaaagtaaataagtcacaaaaytcaaattctgcttcttttgaaactccactcaaatttaagtatctatgctgttaagtcatacctatgcaaatccagaaatacagatttattaaaacaactgatgcgtaggctcaaggtagccctatgtttaaaattcaacagttctgtgcaatcaaacaaatatggtaatcaacatttgatatttaatcttccctctaatatgcgtggatgatgtgcagaaaataacgtgctacttcaatagataacacttttaacttcaagttctttatatt

SEQ ID NO: 95748 - DNA, 442 bp, Chicken  19866894618505_1
ccagccacagactctctgcaagaaagaagcctggttagatgtctgggatgtcagctgtctaccactagctaaataatgttaagcaacaagaaaaacagaacagaatttgtgttcatcatcccactgggcaactgcaaagcaggggcagctcatggagcttatatacctcaccaaacattactgaagaaaaaacctcgatgaaaatatcttgttttaattatatttcccgatctggcagctttgcagaagaatcgcatgtgatgctgtaaatgtggtggccatacagtagtacaggtacartacagatgaaatacaaatacacataatcaaggcccatgaagcagctggggattcaacagaggcagccctcctttagatgttgtactaagggacacggtttagtggggaagtgttggtggtgagtggttggttggactggatg

SEQ ID NO: 95749 - DNA, 600 bp, Chicken  19866894618507_1
aggctattctctgcaggagctgtgtgcctctgcctatccactgtactcttagggaagatagcttggggaatgcagctagagggcaaattgtcacgtttctcttgtgtttcactgcactccagcaattttcactccaaatccttaccagagcataaataaatggatttactaaccaaatgcttttcttctccatacccactctgcttctactcacatcttctcagacatgtgaggatatatacagatgcataatgttcagacttgcttatattataagaggaagaaaatagattctaatamatttcatttkttgaaatagctatgcttttctgctgctcttcccatccagtctcaatagaaaataaataaaatggaggtagtgcagaaggcagccctggtaggatttgcatacagactttgaaacacagtgcatcgggtagtgatagctgaaaagcagctttgtatttggctctttctgcaaaagttgtgttcaaatcagagaccttgtggtctctgaatcatggccttgtggaaaaatagctcccagtcgagcacatatctgaaaaaagatcataaatgctttttaaaacaaaataaata

SEQ ID NO: 95750 - DNA, 600 bp, Chicken  19866894618507_2
ctgcaggagctgtgtgcctctgcctatccactgtactcttagggaagatagcttggggaatgcagctagagggcaaattgtcacgtttctcttgtgtttcactgcactccagcaattttcactccaaatccttaccagagcataaataaatggatttactaaccaaatgcttttcttctccatacccactctgcttctactcacatcttctcagacatgtgaggatatatacagatgcataatgttcagacttgcttatattataagaggaagaaaatagattctaatamatttcatttkttgaaatagctatgcttttctgctgctcttcccatccagtctcaatagaaaataaataaaatggaggtagtgcagaaggcagccctggtaggatttgcatacagactttgaaacacagtgcatcgggtagtgatagctgaaaagcagctttgtatttggctctttctgcaaaagttgtgttcaaatcagagaccttgtggtctctgaatcatggccttgtggaaaaatagctcccagtcgagcacatatctgaaaaaagatcataaatgctttttaaaacaaaataaataaggacacagg

SEQ ID NO: 95751 - DNA, 600 bp, Chicken  19866894618512_1
atctgtaactattaggttatgtgagttatgaaataaggaccagtagatgttctccagaaggacgtcttgtgcatgtaaaacttctacttcaatggctttgccctttgtcattcgtatttcatgtggttggctgaagtgctgcctttgttttggtaggtgaggatttttttccttccaaattattcctgcttatgctgtctttcttaattttcattaaacagatcagccttttgacttacaaactgtgttgttggtaagaagaggggctgatgtctcgaacaccagctgataaatctattyggcagagagatgggactttgtgtttggaggaagtatgttcaaaggaagacttgtctcaaaactcagaagtgtgtatgtatattttcccttaaragtcatccagtgcttgccctgagtgagcygtacacaagcgcgccttgcagagcaccgggccaaggtctgtgcatgtggttggtgtgggctcctggtctgcagctcattggcttccagtggaaatcctaattattaaacctgagatactctgtcctgtcttgcccaaaccagaggaaaagaacagcagtgggtagtagtatttccagg

SEQ ID NO: 95752 - DNA, 600 bp, Chicken  19866894618512_2
ggctttgccctttgtcattcgtatttcatgtggttggctgaagtgctgcctttgttttggtaggtgaggatttttttccttccaaattattcctgcttatgctgtctttcttaattttcattaaacagatcagccttttgacttacaaactgtgttgttggtaagaagaggggctgatgtctcgaacaccagctgataaatctattyggcagagagatgggactttgtgtttggaggaagtatgttcaaaggaagacttgtctcaaaactcagaagtgtgtatgtatattttcccttaaragtcatccagtgcttgccctgagtgagcygtacacaagcgcgccttgcagagcaccgggccaaggtctgtgcatgtggttggtgtgggctcctggtctgcagctcattggcttccagtggaaatcctaattattaaacctgagatactctgtcctgtcttgcccaaaccagaggaaaagaacagcagtgggtagtagtatttccaggatgactaactagcttagcaagttcctattaatcattccaaaaccttctaagttgacccttttcataatctcaaagtaacaaagagttcctgtc

SEQ ID NO: 95753 - DNA, 600 bp, Chicken  19866894618512_3
gtggttggctgaagtgctgcctttgttttggtaggtgaggatttttttccttccaaattattcctgcttatgctgtctttcttaattttcattaaacagatcagccttttgacttacaaactgtgttgttggtaagaagaggggctgatgtctcgaacaccagctgataaatctattyggcagagagatgggactttgtgtttggaggaagtatgttcaaaggaagacttgtctcaaaactcagaagtgtgtatgtatattttcccttaaragtcatccagtgcttgccctgagtgagcygtacacaagcgcgccttgcagagcaccgggccaaggtctgtgcatgtggttggtgtgggctcctggtctgcagctcattggcttccagtggaaatcctaattattaaacctgagatactctgtcctgtcttgcccaaaccagaggaaaagaacagcagtgggtagtagtatttccaggatgactaactagcttagcaagttcctattaatcattccaaaaccttctaagttgacccttttcataatctcaaagtaacaaagagttcctgtctccattccaaacccatgttactcgatggt

SEQ ID NO: 95754 - DNA, 600 bp, Chicken  19866894618528_1
agcatgtaaaaatgttccagtgcaagtacaactgtgtaagggtgaaagtaataactgatggagaaaaaaaaacacggtgtggctacctgtggcaaataaagtggcaaatagaagaataatgagccataatgtggttattccattctgtgataatcacagaatcataaaacggctcaggttggaagggaccttgaaagatcatcaggtaaaaatttatgtgggaataatattttgattcagtgggttctgtagatatttggcacctctgggagatatcttgtagctataaattgcaactastttctcaatatctttttctccaagtttgcaattgagccaaagggcatgaaacagaatgaacatattgttaaaccctctcccctagctctaagtattagtatgataaattagatactacacaatctttaggtagtaaagtgagatcagattaatcttgtacatgataaactaagactttattacctaaatgttagtgtcttgtctaagctaattgaatatggtccttcattagtcaacagagacagagcctcttctaaaagattattaacagcctgttttatggtgagataaactactgtc

SEQ ID NO: 95755 - DNA, 600 bp, Chicken  19866894618529_1
attttccatctcagaacatcgttagcagaaacttaatgaatctttaggagagctcccagtgtccgtagggctttgcttggttttggactgggttgttactgctccaggaagtcacctgaaggttaatgcaattgccgtaatacaatagatgtaagaaaatagattatatgttgatttaaagtctgggcttccaaacggtgcagctcccattggaaaacacccaggtttttggagctgtttccaaaacactttttaagaaaagcagaaaaatgaattcatggccagagctgtggggtcccyctgcagccagtctgcagagaccacactacagcaaacagcacaggcggggtgccaggtgggaagaggaaggtgagaggggctctttgtgacctcctcacagttcctggtgcccatgcgggatgctgagygcattgcctgggatgtggcgaccgacgtgcgatggttcctgggattctgggtgtttgatccgaggaaatcaccggtgagccaggaaatgtcaagattacatcacaggcagaaattttttaaagccctaaaagagagcttgttaaagcccatttctccgcagcacaatcccag

SEQ ID NO: 95756 - DNA, 600 bp, Chicken  19866894618529_2
caattgccgtaatacaatagatgtaagaaaatagattatatgttgatttaaagtctgggcttccaaacggtgcagctcccattggaaaacacccaggtttttggagctgtttccaaaacactttttaagaaaagcagaaaaatgaattcatggccagagctgtggggtcccyctgcagccagtctgcagagaccacactacagcaaacagcacaggcggggtgccaggtgggaagaggaaggtgagaggggctctttgtgacctcctcacagttcctggtgcccatgcgggatgctgagygcattgcctgggatgtggcgaccgacgtgcgatggttcctgggattctgggtgtttgatccgaggaaatcaccggtgagccaggaaatgtcaagattacatcacaggcagaaattttttaaagccctaaaagagagcttgttaaagcccatttctccgcagcacaatcccagctgctttcatttttgcgttgcacttcagctttactgcagcgggcaagcggagcctcccccaaacaccgctctgctttcctctcccccaacacatggagctttcgccaaccccaactcctggctccccc

SEQ ID NO: 95757 - DNA, 599 bp, Chicken  19866894618562_1
  misc_feature (1)..(26): n is any nucleotide
nnnnnnnnnnnnnnnnnnnnnnnnnntctgtggcaaacatttcactgacttccaggggaccattacactatccagtgtatgtgcgcacagaaatattacattgcccgaattgatcacctgctgggctgtgtttcagataacaactattactgatagggagagaagaaaagagatgttaagagctgagaaatttagcagaaaatagttcattccctgttttggaaacgttacttttaacaggtcctacagaagctatggtgtcattcaggcttctgccttctctttaccaaagtccatttmttttagwaaacaataaatggatttaggaactagcactgctttcaaaacacttgctgaaaatcgttatgttcaaaaacactaggacgttgtgctggctctgaggattcattcacacataccacactgcagccaaaggtatcctgaagagagccttaggagaataccttagtaaacactgtggtcagtttttcaaatttactgttagcatccttgttagyacttccaagtatatggaataaaagataaaaaagataaatattactatatagaaaactgaataartctattgatctcatgaa

SEQ ID NO: 95758 - DNA, 599 bp, Chicken  19866894618562_2
  misc_feature (1)..(19): n is any nucleotide
nnnnnnnnnnnnnnnnnnntctgtggcaaacatttcactgacttccaggggaccattacactatccagtgtatgtgcgcacagaaatattacattgcccgaattgatcacctgctgggctgtgtttcagataacaactattactgatagggagagaagaaaagagatgttaagagctgagaaatttagcagaaaatagttcattccctgttttggaaacgttacttttaacaggtcctacagaagctatggtgtcattcaggcttctgccttctctttaccaaagtccatttmttttagwaaacaataaatggatttaggaactagcactgctttcaaaacacttgctgaaaatcgttatgttcaaaaacactaggacgttgtgctggctctgaggattcattcacacataccacactgcagccaaaggtatcctgaagagagccttaggagaataccttagtaaacactgtggtcagtttttcaaatttactgttagcatccttgttagyacttccaagtatatggaataaaagataaaaaagataaatattactatatagaaaactgaataartctattgatctcatgaaggaccta

SEQ ID NO: 95759 - DNA, 585 bp, Chicken  19866894618562_3
ttggaaacgttacttttaacaggtcctacagaagctatggtgtcattcaggcttctgccttctctttaccaaagtccatttmttttagwaaacaataaatggatttaggaactagcactgctttcaaaacacttgctgaaaatcgttatgttcaaaaacactaggacgttgtgctggctctgaggattcattcacacataccacactgcagccaaaggtatcctgaagagagccttaggagaataccttagtaaacactgtggtcagtttttcaaatttactgttagcatccttgttagyacttccaagtatatggaataaaagataaaaaagataaatattactatatagaaaactgaataartctattgatctcatgaaggacctactaaacttttaaaacatccacactacagtggtttgcagcgtcaaactattgctctctgtggctgatgctttcaatttatgttcagcttggagaattatttatcgctttcaaagacagatgggagcccctgatggctggattttctggttcatacttcagaaattagcttggtatatgtgaaaatctccagtatttcc

SEQ ID NO: 95760 - DNA, 521 bp, Chicken  19866894618562_4
tttaccaaagtccatttmttttagwaaacaataaatggatttaggaactagcactgctttcaaaacacttgctgaaaatcgttatgttcaaaaacactaggacgttgtgctggctctgaggattcattcacacataccacactgcagccaaaggtatcctgaagagagccttaggagaataccttagtaaacactgtggtcagtttttcaaatttactgttagcatccttgttagyacttccaagtatatggaataaaagataaaaaagataaatattactatatagaaaactgaataartctattgatctcatgaaggacctactaaacttttaaaacatccacactacagtggtttgcagcgtcaaactattgctctctgtggctgatgctttcaatttatgttcagcttggagaattatttatcgctttcaaagacagatgggagcccctgatggctggattttctggttcatacttcagaaattagcttggtatatgtgaaaatctccagtatttcc

SEQ ID NO: 95761 - DNA, 600 bp, Chicken  19866894618570_1
gggcatgggtagtgtgggccttccttcagatagctttgcatctgctgtgctgtcagatgtatctcctgctcatctacctgtgacctctctgtttggaaagcatctcctggattaaagagggtttgaggtctgatgcatctgatattttatctctctggattttgctatccacatatttataatacataagcatgtattataaaaattaccttatttatacacaatataacatttatttgtcactgacctttagacaagacagtgagtcaattttatagttccacttctccactgatgaamaaacaagtggcaaagctgttaactgtctatgttttcacaagaaattgctctggttaagagaacaagtggaacagaagtattagtcagccaacatcaagattaggtgagttrttagctctgacctacacctgctgtttttttccagttttgctcagctagaaggtaagggggaactatatcttttgattaaagcttgcatttatacttgtatctctctgaggtatcctgcagtgtggttgcatcactactgaaaaatgttttgttttgttttgttttactcctggttcaaagatcttccct

SEQ ID NO: 95762 - DNA, 547 bp, Chicken  19866894618570_2
ttaaagagggtttgaggtctgatgcatctgatattttatctctctggattttgctatccacatatttataatacataagcatgtattataaaaattaccttatttatacacaatataacatttatttgtcactgacctttagacaagacagtgagtcaattttatagttccacttctccactgatgaamaaacaagtggcaaagctgttaactgtctatgttttcacaagaaattgctctggttaagagaacaagtggaacagaagtattagtcagccaacatcaagattaggtgagttrttagctctgacctacacctgctgtttttttccagttttgctcagctagaaggtaagggggaactatatcttttgattaaagcttgcatttatacttgtatctctctgaggtatcctgcagtgtggttgcatcactactgaaaaatgttttgttttgttttgttttactcctggttcaaagatcttcccttcaaccaacaacagtttggctgaaaataccttgaaaaactacactagtgagcttctgg

SEQ ID NO: 95763 - DNA, 600 bp, Chicken  19866894618577_1
ccaatgctcttggcttttcacaggacttggtgctttgctgttacatgaagccttgttttatccggttcttcactagcctacttgctaaatgttcccagtatggataacatatacttgttagccccagctacagttggactaaacattatgagagacaccaggtggacatgtggcactgaggtatctgggtagtgaacatgatggtgatgaactacaggatctcagtggtctcttccaaccttaattattctatgattccatgacatatattctatttggtctatgaacactgatgcagcwctgaggatactgtatgtttaaaagaacaggaatgtggaaaaatcatattccrtagcccagtagtctgaacttgagtcattgctggatgggagccaatccccacagtagtaattttatcacttgcaaaaagcctaaagcagcttttcattttctaccttagaaattaaaaaagtatctcctctcccaaattaaatcagaatcttaccactctatgaagctgaaatttgacaagaaagcaaagcaattcatcataattataaaaatctgcacatgatctgtaagagtagagaaacctttcag

SEQ ID NO: 95764 - DNA, 600 bp, Chicken  19866894618577_2
ttgttttatccggttcttcactagcctacttgctaaatgttcccagtatggataacatatacttgttagccccagctacagttggactaaacattatgagagacaccaggtggacatgtggcactgaggtatctgggtagtgaacatgatggtgatgaactacaggatctcagtggtctcttccaaccttaattattctatgattccatgacatatattctatttggtctatgaacactgatgcagcwctgaggatactgtatgtttaaaagaacaggaatgtggaaaaatcatattccrtagcccagtagtctgaacttgagtcattgctggatgggagccaatccccacagtagtaattttatcacttgcaaaaagcctaaagcagcttttcattttctaccttagaaattaaaaaagtatctcctctcccaaattaaatcagaatcttaccactctatgaagctgaaatttgacaagaaagcaaagcaattcatcataattataaaaatctgcacatgatctgtaagagtagagaaacctttcagcctagtacatggcttagatactagcagaagaagcatgatattggccatttct

SEQ ID NO: 95765 - DNA, 600 bp, Chicken  19866894618588_1
ttgcttgggaagggaaaaatcgaaaaagaagcattgtgtcctccaaagtagcctttgttattatcttgagaaacattccttgcacacacatacagaaatctaaatggatgagcttaatgcctttagattcatgagcaatattgcatgagtacagcatattatcacagagatttttctgttgcctaaatgcaaatgagatggtaggtctttatgctaacataatgtttaacttcctgcaaacagatctgttgtagaccaagactcttaagcttaatatggtagataagaatcttattaacygaagtgattctcatttaactgtggaatatatcaggtgtaataggaaaagcacaatcagaagattttcctgttacctccatgctcagmccactcatttccaaaccctggagattattgatagggaaggagataagtaacagtatgtaacaagcatacataaaggacagacaataccagacgatcatgcaatcagaatctgytcctgcctgtgctgaacaacaggcatttgatatgacaggagggaaacaatcaccatcaagcaaggaaagacaacaagaacaatcagatgtttagaaaaca

SEQ ID NO: 95766 - DNA, 600 bp, Chicken  19866894618588_2
acatacagaaatctaaatggatgagcttaatgcctttagattcatgagcaatattgcatgagtacagcatattatcacagagatttttctgttgcctaaatgcaaatgagatggtaggtctttatgctaacataatgtttaacttcctgcaaacagatctgttgtagaccaagactcttaagcttaatatggtagataagaatcttattaacygaagtgattctcatttaactgtggaatatatcaggtgtaataggaaaagcacaatcagaagattttcctgttacctccatgctcagmccactcatttccaaaccctggagattattgatagggaaggagataagtaacagtatgtaacaagcatacataaaggacagacaataccagacgatcatgcaatcagaatctgytcctgcctgtgctgaacaacaggcatttgatatgacaggagggaaacaatcaccatcaagcaaggaaagacaacaagaacaatcagatgtttagaaaacatgtcccatgtatcaagccttgaagagctgaggctgtctggaaaacaactggttagaaggaagggagtaacagtattcaggtaaacat

SEQ ID NO: 95767 - DNA, 600 bp, Chicken  19866894618588_3
gtaggtctttatgctaacataatgtttaacttcctgcaaacagatctgttgtagaccaagactcttaagcttaatatggtagataagaatcttattaacygaagtgattctcatttaactgtggaatatatcaggtgtaataggaaaagcacaatcagaagattttcctgttacctccatgctcagmccactcatttccaaaccctggagattattgatagggaaggagataagtaacagtatgtaacaagcatacataaaggacagacaataccagacgatcatgcaatcagaatctgytcctgcctgtgctgaacaacaggcatttgatatgacaggagggaaacaatcaccatcaagcaaggaaagacaacaagaacaatcagatgtttagaaaacatgtcccatgtatcaagccttgaagagctgaggctgtctggaaaacaactggttagaaggaagggagtaacagtattcaggtaaacatggtacaagtgcagagtggaaggaccagcacatgtccatgttgcagtggtctagctagagcacagcatgtggttcttgtactacacattaaatgtatttttctagctatttgat

SEQ ID NO: 95768 - DNA, 599 bp, Chicken  19866894618589_1
  misc_feature (1)..(85): n is any nucleotide
nnnnnnnnnnnnnnnnnnnnnnnnnnnnnnnnnnnnnnnnnnnnnnnnnnnnnnnnnnnnnnnnnnnnnnnnnnnnnnnnnnnnngtttaaaagaggcttgtaattggggctgataacccactgctgctgcaggcaaaaggtaaatgccaggagggacccgaagaatcagctcttcaggtttttattcaatcccaggcttcctcagatccctttggagcctaagccaaactgtatgttttacattttctcaaagttaaatgatatacttaaacaacagacaacagcctggcaggcttaartatatattcacttacatgcaaatatcagygctcattatccctacctactttctgtcactccataatacatggtggaactcttacctgtgcttcccaggcgctakgagcgcaggactggctgctgtatgtatggcatatgctgggatagatactgtgtttctcgtaaaccacaaagacacaacataaaggggtacatgtattttcttaagcaaaaaaagtttgaaaacaggtcttacttacccagtatattatgacggcacggaaggttccaccacagtgtgccaaataaagatttttaa

SEQ ID NO: 95769 - DNA, 599 bp, Chicken  19866894618589_2
  misc_feature (1)..(56): n is any nucleotide
nnnnnnnnnnnnnnnnnnnnnnnnnnnnnnnnnnnnnnnnnnnnnnnnnnnnnnnngtttaaaagaggcttgtaattggggctgataacccactgctgctgcaggcaaaaggtaaatgccaggagggacccgaagaatcagctcttcaggtttttattcaatcccaggcttcctcagatccctttggagcctaagccaaactgtatgttttacattttctcaaagttaaatgatatacttaaacaacagacaacagcctggcaggcttaartatatattcacttacatgcaaatatcagygctcattatccctacctactttctgtcactccataatacatggtggaactcttacctgtgcttcccaggcgctakgagcgcaggactggctgctgtatgtatggcatatgctgggatagatactgtgtttctcgtaaaccacaaagacacaacataaaggggtacatgtattttcttaagcaaaaaaagtttgaaaacaggtcttacttacccagtatattatgacggcacggaaggttccaccacagtgtgccaaataaagatttttaagccagtggaaggtaatatcatataactcc

SEQ ID NO: 95770 - DNA, 600 bp, Chicken  19866894618589_3
ttggggctgataacccactgctgctgcaggcaaaaggtaaatgccaggagggacccgaagaatcagctcttcaggtttttattcaatcccaggcttcctcagatccctttggagcctaagccaaactgtatgttttacattttctcaaagttaaatgatatacttaaacaacagacaacagcctggcaggcttaartatatattcacttacatgcaaatatcagygctcattatccctacctactttctgtcactccataatacatggtggaactcttacctgtgcttcccaggcgctakgagcgcaggactggctgctgtatgtatggcatatgctgggatagatactgtgtttctcgtaaaccacaaagacacaacataaaggggtacatgtattttcttaagcaaaaaaagtttgaaaacaggtcttacttacccagtatattatgacggcacggaaggttccaccacagtgtgccaaataaagatttttaagccagtggaaggtaatatcatataactcccacttaaggcaatgaaagttttatgtttggaaagattacagttacagaactcaaattgactattgactctgtttaa

SEQ ID NO: 95771 - DNA, 600 bp, Chicken  19866894618590_1
tgctaaagtctgcaagcagaatagcacatacaccatatgaatatccattactttgtactccgtttattctaagattaaatggaaattagaatgcctgctttactttatgagcagacattgctttcttcaagaaaaggaagtgtactaaagcctgcttttctgtacactggtaattctctacagactttgatttcagaagctattttaattttgttctaataatgaaattttatcatacatcaggtatagctgcagtgaagacctcttttgtttcccaaaataaggatcagcatcttattyttcatctgtcaaatctcaatggttagctgtatgcagagtataaattttagctctgtgaaagtgactcttctggttagaagctctttacaacatcacatatagtactccagtagaaacatgtccagattggaaaygtgctttttaaaaaatatacttaattattttagtgagatctgggcatytcatttactgaaatcagcaatttctgattttctatgctaaactagcaaaatatttttactccatgtagtaactggaaaggttttttatttatttgtttctacaagtcctacacattgt

SEQ ID NO: 95772 - DNA, 600 bp, Chicken  19866894618590_2
aggaagtgtactaaagcctgcttttctgtacactggtaattctctacagactttgatttcagaagctattttaattttgttctaataatgaaattttatcatacatcaggtatagctgcagtgaagacctcttttgtttcccaaaataaggatcagcatcttattyttcatctgtcaaatctcaatggttagctgtatgcagagtataaattttagctctgtgaaagtgactcttctggttagaagctctttacaacatcacatatagtactccagtagaaacatgtccagattggaaaygtgctttttaaaaaatatacttaattattttagtgagatctgggcatytcatttactgaaatcagcaatttctgattttctatgctaaactagcaaaatatttttactccatgtagtaactggaaaggttttttatttatttgtttctacaagtcctacacattgttttatctttcacaaattgcatcagaaagtcctagttctcctgggactgaatattccatatttacagcatacttactccgtgttctgggaaagtgcagtcatgttgattaactgcctcagcagttccttaggccc

SEQ ID NO: 95773 - DNA, 600 bp, Chicken  19866894618590_3
gactttgatttcagaagctattttaattttgttctaataatgaaattttatcatacatcaggtatagctgcagtgaagacctcttttgtttcccaaaataaggatcagcatcttattyttcatctgtcaaatctcaatggttagctgtatgcagagtataaattttagctctgtgaaagtgactcttctggttagaagctctttacaacatcacatatagtactccagtagaaacatgtccagattggaaaygtgctttttaaaaaatatacttaattattttagtgagatctgggcatytcatttactgaaatcagcaatttctgattttctatgctaaactagcaaaatatttttactccatgtagtaactggaaaggttttttatttatttgtttctacaagtcctacacattgttttatctttcacaaattgcatcagaaagtcctagttctcctgggactgaatattccatatttacagcatacttactccgtgttctgggaaagtgcagtcatgttgattaactgcctcagcagttccttaggccctgctgctcttagtcactgtaatctctttctgtacaggctgagtagcca

SEQ ID NO: 95774 - DNA, 599 bp, Chicken  19866894618593_1
  misc_feature (1)..(124): n is any nucleotide
nnnnnnnnnnnnnnnnnnnnnnnnnnnnnnnnnnnnnnnnnnnnnnnnnnnnnnnnnnnnnnnnnnnnnnnnnnnnnnnnnnnnnnnnnnnnnnnnnnnnnnnnnnnnnnnnnnnnnnnnnnnngtttgatatttgatatgaaaatggtcatcttacaaacagggagatagacaaagcagagacttttaatgccttcttcacctctgtcttcaacactgattctgggctctgtcatctcgtgtgctccaagctatggtagcgaccaactgccagccagcccagaacttctgctggatttsctgctcyacctgggtgcatgtaagttcatgggatgcaatgggattcatcccaaggtactcagagagctggctgatgtcactgggagacccgtctcaattattttttaaatggtctggtccaattatttttaaatggaacctggagaggcccgagttgactggaagctggcaaacattccaattttcaagaaagtcaagaaagaagaacctggtaattacaggccagtccatctgacttcagtatctggtaaagttatggagaaaattattttgggggtttctaaaaaacaccgtaagga

SEQ ID NO: 95775 - DNA, 599 bp, Chicken  19866894618593_2
  misc_feature (1)..(117): n is any nucleotide
nnnnnnnnnnnnnnnnnnnnnnnnnnnnnnnnnnnnnnnnnnnnnnnnnnnnnnnnnnnnnnnnnnnnnnnnnnnnnnnnnnnnnnnnnnnnnnnnnnnnnnnnnnnnnnnnnnnnngtttgatatttgatatgaaaatggtcatcttacaaacagggagatagacaaagcagagacttttaatgccttcttcacctctgtcttcaacactgattctgggctctgtcatctcgtgtgctccaagctatggtagcgaccaactgccagccagcccagaacttctgctggatttsctgctcyacctgggtgcatgtaagttcatgggatgcaatgggattcatcccaaggtactcagagagctggctgatgtcactgggagacccgtctcaattattttttaaatggtctggtccaattatttttaaatggaacctggagaggcccgagttgactggaagctggcaaacattccaattttcaagaaagtcaagaaagaagaacctggtaattacaggccagtccatctgacttcagtatctggtaaagttatggagaaaattattttgggggtttctaaaaaacaccgtaaggacaatgta

SEQ ID NO: 95776 - DNA, 600 bp, Chicken  19866894618599_1
aattaatcttgttttatcaaggtcaaaaccaagttttctcctacatctctcactccttgtccttgcaatgctgcatgaaaagttctagggggtaaaaagagagagactggagaaagcaattcagaatcaacacgtaaatgcatcagtcagagaattccctgttgccaatcttctcccagtcaggaatcatgaacaatttcaattcctacagcaagcatgcaaggacagaagcaacaacccgtggagttggagttgtagcagcagtacctcagctgctaatacatactttatatatataamatttggatgagagcagaagttgcacataaattacagtaagattcacaagcgggaaatgagaatcctctccaaaaggacatgatgtgctgtcagaactgtaatgctcagtaatccaatattctgttgatgaaaacatctgtgcaaatctccctggagaagcctatgtacaaacaagcaaatttttacttgggcatcagaacaagggaaaagaagtcctagaaacaacctaggctctcactctgtcacactggaactgaaatcgaggtcactaatttcaaatgagcctgcgtgtgctgtggg

SEQ ID NO: 95777 - DNA, 434 bp, Chicken  19866894618600_1
ctctgaattcttacaaatttggatctgttgtgtagatgctgagggctgcctttgttatcaccaagggctattctgcatgcactgctggcttagttgtgttttggtgtatgatatgcggaaccctttaaaggacagcaccgttttaaatgcttgtaacacaggagcaataatagcagcagtatgctgttctcctaggaacagtgcagctcctatttcaataaaccgtaacccattctcttattttatttgcttgaaaaatatctcaggagctcataaaccagtatgtaaatactgttatcrttcaactaagtgctgtaattttactaaataaagaatgtgttttgtaatggagattaacgggctgtgtgacagtttcagtttgggtacagcactgcatttgaatggaaagggcaatttcagctttgggaggttgt

SEQ ID NO: 95778 - DNA, 600 bp, Chicken  19866894618602_1
tcattctctcttttcacatagattacttggcatgcagtaacttttgatgtacaggggaatatagcaattctccaggggactacagccgtatccttctcaacaacctttctcactgttatcttgtcaacaccagcctgaagaaagatcttgcaaacagagggaaaaaaaaaaatcacagagaaagaacatttctcagccgataacgactttgtaccaacaacaacctatcccattccttccccaactactttaacatcatctcaggcacacgagaaagaagtgactcacttcaggctaatktgsaaaaggaaacagaattttcttatttttgtgaagaaataacaagttgcataggcccmaaaacaaacaaacaacaagaaaaaatataatgctaataaaatacctttttttggcagaaagcaaaacaaaattcataggaaaaagctgacctgtagaaaaagggctgtcaaagaataccaacgtgtttatgtaagtagtttagataaaagctcatttctgtcaatttctttttgcattttgaaataacagactgcagacactccttcatgaaatatcaccccatgttaacacgcaacatac

SEQ ID NO: 95779 - DNA, 600 bp, Chicken  19866894618602_2
ttctctcttttcacatagattacttggcatgcagtaacttttgatgtacaggggaatatagcaattctccaggggactacagccgtatccttctcaacaacctttctcactgttatcttgtcaacaccagcctgaagaaagatcttgcaaacagagggaaaaaaaaaaatcacagagaaagaacatttctcagccgataacgactttgtaccaacaacaacctatcccattccttccccaactactttaacatcatctcaggcacacgagaaagaagtgactcacttcaggctaatktgsaaaaggaaacagaattttcttatttttgtgaagaaataacaagttgcataggcccmaaaacaaacaaacaacaagaaaaaatataatgctaataaaatacctttttttggcagaaagcaaaacaaaattcataggaaaaagctgacctgtagaaaaagggctgtcaaagaataccaacgtgtttatgtaagtagtttagataaaagctcatttctgtcaatttctttttgcattttgaaataacagactgcagacactccttcatgaaatatcaccccatgttaacacgcaacatactgg

SEQ ID NO: 95780 - DNA, 546 bp, Chicken  19866894618602_3
tatagcaattctccaggggactacagccgtatccttctcaacaacctttctcactgttatcttgtcaacaccagcctgaagaaagatcttgcaaacagagggaaaaaaaaaaatcacagagaaagaacatttctcagccgataacgactttgtaccaacaacaacctatcccattccttccccaactactttaacatcatctcaggcacacgagaaagaagtgactcacttcaggctaatktgsaaaaggaaacagaattttcttatttttgtgaagaaataacaagttgcataggcccmaaaacaaacaaacaacaagaaaaaatataatgctaataaaatacctttttttggcagaaagcaaaacaaaattcataggaaaaagctgacctgtagaaaaagggctgtcaaagaataccaacgtgtttatgtaagtagtttagataaaagctcatttctgtcaatttctttttgcattttgaaataacagactgcagacactccttcatgaaatatcaccccatgttaacacgcaacatactgggg

SEQ ID NO: 95781 - DNA, 600 bp, Chicken  19866894618604_1
ctgagagaattatccaaaagctctttgaacaccagcagctcagggccatgcccactgctctggggagcctgttccatgcccacttccctctggtgaagaacctttccctaatactcaacctcccttcagccttctcttcactgggctgaacaaaccaagagacttcagggtaactcagtgattctaacataggctgtggtcgtggagccgctcttaacaccgcatctcctgttgcactgcttcagagcagtgtgatgggctatggcgcatgtgctgtgggagatgcacagcagatgctgygtgtacacgctgtgcatggtccagaggagcatgggtagcagtggcagtgaggcagcagccagcccttcctccggagagatgtgccaatgcatcccagcagctcgctgtgtgagagagcccctttgatataggcgatctcttcctgggggtaggatttcatgtgcagcaagggacagccccattcctgtcccctgcctgccaaaccacaacagagcagctgaccattagtttaaacacttaaaatcagacccttccttcaaaacagatgtggcttcccagagtctcagaatttgctacagg

SEQ ID NO: 95782 - DNA, 600 bp, Chicken  19866894618604_2
tggcagtgaggcagcagccagcccttcctccggagagatgtgccaatgcatcccagcagctcgctgtgtgagagagcccctttgatataggcgatctcttcctgggggtaggatttcatgtgcagcaagggacagccccattcctgtcccctgcctgccaaaccacaacagagcagctgaccattagtttaaacacttaaaatcagacccttccttcaaaacagatgtggcttcccagagtctcagaatttgctacaggcagctcagggctgtggagcttttgaagttcacaatgctctygatacagggagggagggatggtttcctggggctgagtgctgtgctyggctgggacacagctggctttgcactaccctggaaacatcagctaataggatagcttagaaaaacggagggtgcatatgcagttgcttatggctgtaaataaaacattatggggcattgaattacattggctgcctcctttctgcccagccccgatgcacaggaatgatgggcatgagcacaacgtggtgtggtcaggcaaatctgacagaaggtgtgattgtccatggccaacctgagctggttcccaggctg

SEQ ID NO: 95783 - DNA, 577 bp, Chicken  19866894618604_3
tgcatcccagcagctcgctgtgtgagagagcccctttgatataggcgatctcttcctgggggtaggatttcatgtgcagcaagggacagccccattcctgtcccctgcctgccaaaccacaacagagcagctgaccattagtttaaacacttaaaatcagacccttccttcaaaacagatgtggcttcccagagtctcagaatttgctacaggcagctcagggctgtggagcttttgaagttcacaatgctctygatacagggagggagggatggtttcctggggctgagtgctgtgctyggctgggacacagctggctttgcactaccctggaaacatcagctaataggatagcttagaaaaacggagggtgcatatgcagttgcttatggctgtaaataaaacattatggggcattgaattacattggctgcctcctttctgcccagccccgatgcacaggaatgatgggcatgagcacaacgtggtgtggtcaggcaaatctgacagaaggtgtgattgtccatggccaacctgagctggttcccaggctgcctttttccatttgacttcacag

SEQ ID NO: 95784 - DNA, 599 bp, Chicken  19866894618608_1
  misc_feature (1)..(38): n is any nucleotide
nnnnnnnnnnnnnnnnnnnnnnnnnnnnnnnnnnnnnnacccctctcagtaaccctctgactctccagcttagaagtgctcagatctgttctgcacaaagcaatgtgagttccaacagctcttctccctgaagctaacgtgggcctgctggataaacctcaagaaagcgaggagaaaggcctagcgtggccacagccagcatgctttctagaagatcacaagcaagcataacagaaagttcagccacaattaacaagcacctaactgcatccaaagctgttaagtaaatatatatatatwttttttaatcaactgatggaaagcatcagttgttcagtttactaggggcygtacgtggtaggctctgtgacagcatcagggacatcactgctcctggggtrgtgagtgtggagcagaccccaggagcacagcactgctgtcctgacttctgtctatgagtacaacagctaaaacccaacacaccttaaatcctgatccgactaattacaacagtaaaaaaaactggatggtgatgaactcaaagaagcagtttaaggttcactgtgtgcagtagtaataattaatccagttggaatcta

SEQ ID NO: 95785 - DNA, 600 bp, Chicken  19866894618608_2
aaccctctgactctccagcttagaagtgctcagatctgttctgcacaaagcaatgtgagttccaacagctcttctccctgaagctaacgtgggcctgctggataaacctcaagaaagcgaggagaaaggcctagcgtggccacagccagcatgctttctagaagatcacaagcaagcataacagaaagttcagccacaattaacaagcacctaactgcatccaaagctgttaagtaaatatatatatatwttttttaatcaactgatggaaagcatcagttgttcagtttactaggggcygtacgtggtaggctctgtgacagcatcagggacatcactgctcctggggtrgtgagtgtggagcagaccccaggagcacagcactgctgtcctgacttctgtctatgagtacaacagctaaaacccaacacaccttaaatcctgatccgactaattacaacagtaaaaaaaactggatggtgatgaactcaaagaagcagtttaaggttcactgtgtgcagtagtaataattaatccagttggaatctaaaatctaaaatcctgtccgagtgtcagcagaaatcaggtgccagttctgct

SEQ ID NO: 95786 - DNA, 600 bp, Chicken  19866894618608_3
aatgtgagttccaacagctcttctccctgaagctaacgtgggcctgctggataaacctcaagaaagcgaggagaaaggcctagcgtggccacagccagcatgctttctagaagatcacaagcaagcataacagaaagttcagccacaattaacaagcacctaactgcatccaaagctgttaagtaaatatatatatatwttttttaatcaactgatggaaagcatcagttgttcagtttactaggggcygtacgtggtaggctctgtgacagcatcagggacatcactgctcctggggtrgtgagtgtggagcagaccccaggagcacagcactgctgtcctgacttctgtctatgagtacaacagctaaaacccaacacaccttaaatcctgatccgactaattacaacagtaaaaaaaactggatggtgatgaactcaaagaagcagtttaaggttcactgtgtgcagtagtaataattaatccagttggaatctaaaatctaaaatcctgtccgagtgtcagcagaaatcaggtgccagttctgctgttagggtgagtgccgtgcaggcctggcagctccaggaaagggctctggga

SEQ ID NO: 95787 - DNA, 577 bp, Chicken  19866894618613_1
aaagactgatcttgcattgcttattcaagacaaagatactcttatcttcacatgcccttgttcacatggaacattcacagtgttccagcactgtgtggaaagaaatcccttcaaaatgtctttcccctttctggccatattcacagtgatttcaacaaccaagtgatgaaatatcactaatttagtatgtgcgtataacaaagagaagggtttaccccgattctcattatcatgataattttttcttacgtgaagtcttccaccgaattagaaaagcaaaggtgttccaaaagaaggggrtgtgggatgtgcaggcagattcactagaaaattaatacatgttcatttccactggataggactagatagttcaggaaaatggtaattttccttatgcatattaataccgtcagcttgaatgcagcttagattggttataactagaagctcattcagtgcatgagatgcatgagaaaattgaagtttatggtatatttttattcacttcttttkgatggcagatactgttgcctcaaaccagtttccagcagatgatcttcacgctaccaaaaccaca

SEQ ID NO: 95788 - DNA, 364 bp, Chicken  19866894618613_2
accccgattctcattatcatgataattttttcttacgtgaagtcttccaccgaattagaaaagcaaaggtgttccaaaagaaggggrtgtgggatgtgcaggcagattcactagaaaattaatacatgttcatttccactggataggactagatagttcaggaaaatggtaattttccttatgcatattaataccgtcagcttgaatgcagcttagattggttataactagaagctcattcagtgcatgagatgcatgagaaaattgaagtttatggtatatttttattcacttcttttkgatggcagatactgttgcctcaaaccagtttccagcagatgatcttcacgctaccaaaaccaca

SEQ ID NO: 95789 - DNA, 600 bp, Chicken  19866894618619_1
tgcatcaggcaaagcatgcagcctgtcctgggttttagtacagttatttgagtcatgcaattgttctctcatttctgccatgcttttatgaatttcaaggtgttgcaaatgtgttttgcgcacttcactcatcgtgctgtatgctggtttggcatttattgtgcaggaagcagtgctagcttcagatactgctcgtaaactactagccagaggaaaacctgctctgacttttggaccagaatctgttgaagagatacaaaacttctcaagctgagctgatgggctttccgttctagtaaytgtagcatcagcataagcagaatttgttaagagatcagatgattccatcaatcttttgtcactagacgttttctgcatttgcaagctatatgaactggcatgcagactacgagaactacaacagcgttgctcttctagctcggtttcagaatgtaagagattggactctggtgtctcagaaagcggtggcaaagagatatcatcaggtgatatacactcgtattcatctccggagggtacttcttctgccaggaattcagtctgtaaactatcctctttggctgaagatgacagctctgt

SEQ ID NO: 95790 - DNA, 599 bp, Chicken  19866894618624_1
  misc_feature (1)..(126): n is any nucleotide
nnnnnnnnnnnnnnnnnnnnnnnnnnnnnnnnnnnnnnnnnnnnnnnnnnnnnnnnnnnnnnnnnnnnnnnnnnnnnnnnnnnnnnnnnnnnnnnnnnnnnnnnnnnnnnnnnnnnnnnnnnnnnncatctgactcaattttatgatcctgtgatcctgtcgctgtgttaagagtttctaatgccctgtggaatcaatacttaacttactgtcagagtgatgtgatgtagacaaaaccattacaggtaaaaaggtggctgatgccccagaggtatccttcaaatcacttttttttttttwtttattttccaatggagtgggaaatattaacaaggctattcaggcatttatgcagatacagtaaactgagacaagtatatatggatatgtaagatgttttgtatcattaagtgacattcattctcttggagtgatataaccctttgcccaaaacaagtggagttagtgttatctcatgtttactgcttggttgtcatattgtaagggaagatattacaatagtagtgaccatggtttctccaggttgctcctgaagaaggtgaggagacagtatcagaaacaaacaaacaaacaaacaa

SEQ ID NO: 95791 - DNA, 448 bp, Chicken  19866894618624_2
atatatggatatgtaagatgttttgtatcattaagtgacattcattctcttggagtgatataaccctttgcccaaaacaagtggagttagtgttatctcatgtttactgcttggttgtcatattgtaagggaagatattacaatagtagtgaccatggtttctccaggttgctcctgaagaaggtgaggagacagtatcagaaacaaacaaacaaacaaacaaacaataacatcctaagaggaaaaagagaaggataaacgaaggttctggtcattggaatatataatcaggaggcgtamagcagatgccaggcattaagactagtcccatacataggctcaggagcaaactgtttgtttgggaagaatatggaactgctgaccagaagtcatctgaggtcaccagtgagggattgatggctagaaaagcattggatacccactgatt

SEQ ID NO: 95792 - DNA, 548 bp, Chicken  19866894618633_1
tcattgtcattaatcctactaaccatgggattttctttgaagtctttagcttcccttatcaattttctacactttataatgtttaatttattttgccgtgtgtgctaaggtctctttctttcacgttgtcacgtgttgcattcttatttctaattagtgtgtttcctttccctttgaacaaagttttgcttctatccaaagttgagctcatagcttcatgaatttctcttaaaaaattccaaattttcattctaattttcctactcatgttattttcctgcctattaagactcatcctartttcccagttttaagaaataagttattttagagagtcataaatatttattattggtttgtcctgtcctctgtctgtatggagtgcaatctgataacagttggtccctaggctaccaccaactgccagcccataattaatccatctttatatttttcttaaatttgaagagaaaattactgctggctgcatatgtctcccaaattgtagtcccccattaaaaagatatttgcttctgtttttttttcat

SEQ ID NO: 95793 - DNA, 599 bp, Chicken  19866894618636_1
  misc_feature (1)..(45): n is any nucleotide
nnnnnnnnnnnnnnnnnnnnnnnnnnnnnnnnnnnnnnnnnnnnnttcttgcactgcacgctaaaaatcacaagacatatggtgggcactatggtcatagaaaatagactgctccacagcctatctcttcaggtttgacagcaatgtcatcctgaggtctggctgcaatggtccagcttctgaataagacagactctaatcagtgtagttgtagccctggtttagacccaattgggcagttctctaagaaacaagatgtctttctgctgttctggagccttccagaaacaactaactccmtgacagcaccctggctgtgaaaagtccaggctgacatggaaaacaaaacaggctgctgaattgcaccaattatgcactgccaactacaggccagcagaactgggaaaccactcactactgaaaacaatgctgtcaatttcactagagctacagtatggttttccaactagcatcactgaaaacytcttttcactaatttcaaacyrtcacttttttttyctcccagaggctgtattcatgataaggtacagatgacatgaagaagctgtacacagctctgagatagtgacccatcactg

SEQ ID NO: 95794 - DNA, 600 bp, Chicken  19866894618636_2
taagacagactctaatcagtgtagttgtagccctggtttagacccaattgggcagttctctaagaaacaagatgtctttctgctgttctggagccttccagaaacaactaactccmtgacagcaccctggctgtgaaaagtccaggctgacatggaaaacaaaacaggctgctgaattgcaccaattatgcactgccaactacaggccagcagaactgggaaaccactcactactgaaaacaatgctgtcaatttcactagagctacagtatggttttccaactagcatcactgaaaacytcttttcactaatttcaaacyrtcacttttttttyctcccagaggctgtattcatgataaggtacagatgacatgaagaagctgtacacagctctgagatagtgacccatcactgatatttagcaagaatggctccacttggtatggatggactaccgcctgtaggctctttccatgagccaaggagttgttcatgcctttgcrctgtgactgataggaaagcctgaaatagcatcagtatatgccaactcatgcctatttagaactgataaaggaaagtgcaattaaaaggcacagagg

SEQ ID NO: 95795 - DNA, 600 bp, Chicken  19866894618636_3
tagttgtagccctggtttagacccaattgggcagttctctaagaaacaagatgtctttctgctgttctggagccttccagaaacaactaactccmtgacagcaccctggctgtgaaaagtccaggctgacatggaaaacaaaacaggctgctgaattgcaccaattatgcactgccaactacaggccagcagaactgggaaaccactcactactgaaaacaatgctgtcaatttcactagagctacagtatggttttccaactagcatcactgaaaacytcttttcactaatttcaaacyrtcacttttttttyctcccagaggctgtattcatgataaggtacagatgacatgaagaagctgtacacagctctgagatagtgacccatcactgatatttagcaagaatggctccacttggtatggatggactaccgcctgtaggctctttccatgagccaaggagttgttcatgcctttgcrctgtgactgataggaaagcctgaaatagcatcagtatatgccaactcatgcctatttagaactgataaaggaaagtgcaattaaaaggcacagagggatcctcgtgcctgagaactc

SEQ ID NO: 95796 - DNA, 600 bp, Chicken  19866894618636_4
agttgtagccctggtttagacccaattgggcagttctctaagaaacaagatgtctttctgctgttctggagccttccagaaacaactaactccmtgacagcaccctggctgtgaaaagtccaggctgacatggaaaacaaaacaggctgctgaattgcaccaattatgcactgccaactacaggccagcagaactgggaaaccactcactactgaaaacaatgctgtcaatttcactagagctacagtatggttttccaactagcatcactgaaaacytcttttcactaatttcaaacyrtcacttttttttyctcccagaggctgtattcatgataaggtacagatgacatgaagaagctgtacacagctctgagatagtgacccatcactgatatttagcaagaatggctccacttggtatggatggactaccgcctgtaggctctttccatgagccaaggagttgttcatgcctttgcrctgtgactgataggaaagcctgaaatagcatcagtatatgccaactcatgcctatttagaactgataaaggaaagtgcaattaaaaggcacagagggatcctcgtgcctgagaactcc

SEQ ID NO: 95797 - DNA, 600 bp, Chicken  19866894618636_5
gtttagacccaattgggcagttctctaagaaacaagatgtctttctgctgttctggagccttccagaaacaactaactccmtgacagcaccctggctgtgaaaagtccaggctgacatggaaaacaaaacaggctgctgaattgcaccaattatgcactgccaactacaggccagcagaactgggaaaccactcactactgaaaacaatgctgtcaatttcactagagctacagtatggttttccaactagcatcactgaaaacytcttttcactaatttcaaacyrtcacttttttttyctcccagaggctgtattcatgataaggtacagatgacatgaagaagctgtacacagctctgagatagtgacccatcactgatatttagcaagaatggctccacttggtatggatggactaccgcctgtaggctctttccatgagccaaggagttgttcatgcctttgcrctgtgactgataggaaagcctgaaatagcatcagtatatgccaactcatgcctatttagaactgataaaggaaagtgcaattaaaaggcacagagggatcctcgtgcctgagaactcctccaacaactagc

SEQ ID NO: 95798 - DNA, 600 bp, Chicken  19866894618636_6
ggccagcagaactgggaaaccactcactactgaaaacaatgctgtcaatttcactagagctacagtatggttttccaactagcatcactgaaaacytcttttcactaatttcaaacyrtcacttttttttyctcccagaggctgtattcatgataaggtacagatgacatgaagaagctgtacacagctctgagatagtgacccatcactgatatttagcaagaatggctccacttggtatggatggactaccgcctgtaggctctttccatgagccaaggagttgttcatgcctttgcrctgtgactgataggaaagcctgaaatagcatcagtatatgccaactcatgcctatttagaactgataaaggaaagtgcaattaaaaggcacagagggatcctcgtgcctgagaactcctccaacaactagcaaaggctattcaaagcacacacttaagtatagtttggtgctgcattagtgtttcaaaatggtttcacaagcccagtatatgaaaatggagatgagaagacataaatgccttggttagactgttttcaagcaagcagatcacctgcattttttttttttacaaaccaggc

SEQ ID NO: 95799 - DNA, 599 bp, Chicken  19866894618640_1
  misc_feature (1)..(19): n is any nucleotide
nnnnnnnnnnnnnnnnnnngtgttcagaagcatctctgctgctgtgttaacaaatcatcagcctcctcccactgccttgtttgatttctagtgcctgcaagtctgtccaatggctctgcttagagaaccagagttagtttcaggcacggggtcctgaaacctggaaaaccccaatgtttccatgtacagctagcacaggcaaggatagacatcagatggctttatatatctcatggctgcctgctcagaaaggaaggaatggcactgttgtgtggctaaactgaacctactgggcaactstgtgttagttagttgaatcctcagagtccaaagtgggtggaaattgcctataatgctttatgcatgattagtggaagttggtttcagwacgttcttgcagtagtaataataataaaaaaaaacaacaaacacatccaaacaattatgataggtgctggaaaataaactcctctctacctttctgatggaaagtcgatgactgtgtgaaatttcccttgtaaagctgcaggtccttctcccacttcaatgtatctattgtctgtcaccatgggggagttgatctggccttgtgtccgtgc

SEQ ID NO: 95800 - DNA, 600 bp, Chicken  19866894618640_2
tagtgcctgcaagtctgtccaatggctctgcttagagaaccagagttagtttcaggcacggggtcctgaaacctggaaaaccccaatgtttccatgtacagctagcacaggcaaggatagacatcagatggctttatatatctcatggctgcctgctcagaaaggaaggaatggcactgttgtgtggctaaactgaacctactgggcaactstgtgttagttagttgaatcctcagagtccaaagtgggtggaaattgcctataatgctttatgcatgattagtggaagttggtttcagwacgttcttgcagtagtaataataataaaaaaaaacaacaaacacatccaaacaattatgataggtgctggaaaataaactcctctctacctttctgatggaaagtcgatgactgtgtgaaatttcccttgtaaagctgcaggtccttctcccacttcaatgtatctattgtctgtcaccatgggggagttgatctggccttgtgtccgtgcctgtgcctcctccagtgtgagcagctttgtggagggagaagacaccaacagggacttgggccgtgataaagaactgtgtcctgtaaggg

SEQ ID NO: 95801 - DNA, 600 bp, Chicken  19866894618640_3
ctctgcttagagaaccagagttagtttcaggcacggggtcctgaaacctggaaaaccccaatgtttccatgtacagctagcacaggcaaggatagacatcagatggctttatatatctcatggctgcctgctcagaaaggaaggaatggcactgttgtgtggctaaactgaacctactgggcaactstgtgttagttagttgaatcctcagagtccaaagtgggtggaaattgcctataatgctttatgcatgattagtggaagttggtttcagwacgttcttgcagtagtaataataawaaaaaaaaacaacaaacacatccaaacaattatgataggtgctggaaaataaactcctctctacctttctgatggaaagtcgatgactgtgtgaaatttcccttgtaaagctgcaggtccttctcccacttcaatgtatctattgtctgtcaccatgggggagttgatctggccttgtgtccgtgcctgtgcctcctccagtgtgagcagctttgtggagggagaagacaccaacagggacttgggccgtgataaagaactgtgtcctgtaagggaaagccacaggtaagggggaggatc

SEQ ID NO: 95802 - DNA, 594 bp, Chicken  19866894618646_1
tctgataattttcatagcaaataatggaagcgctctttcatccttagacttgtaacaggtgtgtgaggtctgctttaacagtaaaaatgagttctttttaaggaaatagtactaaattgtgaatacatcaactgaattaaagtagccctattcgatttctgagtttgtatcatggtaactcagaaagggacagtgtaggtctgaatagaatacagggcaaggaacgtcgagctctgtagttattaaattcagcactggagtttctctgttcatcagcctgcaggagctgctcagacacarttgggagcagcagtgactcgcacacagaacccacactcagtccccagggcctgcctcatggcggccgagctgttctgctcgtggcaggagctgcaggagctcagttctccagacagcccactgaaacgtgccccttcgaaaattaggagtcttacctccagagatatgaaatataaagcttttcagaataatctgttaaaactgaactactctattcactcgttatctctaaaatagtgaaagattaaatttgagaaaatgcaaaattttgcagctcttctccttaggtgagca

SEQ ID NO: 95803 - DNA, 600 bp, Chicken  19866894618648_1
gcatgcaggcgccagcgctgtgtcggcccgacggagcagggctgataagggccgtaatgccgcctcagcagaaagtgctgcaggaatcaaagagcagctgagtcaccatccgccagggagttgggtaaacatgacagcaggcatcggctggggacttcttgttaagaaataccaggcaccaggggagcgctccctttggcagctgccggatgcttccaaagtgagctctgcagctgaacgctgcctggtagcaccactcaaggtagatcacagagagcagctctctatctgaaaagaagragagggraaaatgttttctccttgagtgcaccagggtgagttcttggyatggccagattatgccatttcagtagaacagtgcaagaaaagataaaccaaagtcctttgcaaacacatcaggagtgtgtgcaaaacccaaacagaaaacactgggagcgttcacgcagggctggccaaggccccagcacagaagcagcttttgttcagcagcaattagtgcattccttcagagccaagggctttccttgttgctgcccctgcccaactgctcccaccgggatgcctgggcagggggagtga

SEQ ID NO: 95804 - DNA, 600 bp, Chicken  19866894618648_2; identical to SEQ ID NO: 95803

SEQ ID NO: 95805 - DNA, 600 bp, Chicken  19866894618648_3
ggcgccagcgctgtgtcggcccgacggagcagggctgataagggccgtaatgccgcctcagcagaaagtgctgcaggaatcaaagagcagctgagtcaccatccgccagggagttgggtaaacatgacagcaggcatcggctggggacttcttgttaagaaataccaggcaccaggggagcgctccctttggcagctgccggatgcttccaaagtgagctctgcagctgaacgctgcctggtagcaccactcaaggtagatcacagagagcagctctctatctgaaaagaagaagagggraaaatgttttctccttgagtgcaccagggtgagttcttggyatggccagattatgccatttcagtagaacagtgcaagaaaagataaaccaaagtcctttgcaaacacatcaggagtgtgtgcaaaacccaaacagaaaacactgggagcgttcacgcagggctggccaaggccccagcacagaagcagcttttgttcagcagcaattagtgcattccttcagagccaagggctttccttgttgctgcccctgcccaactgctcccaccgggatgcctgggcagggggagtgatgatgta

SEQ ID NO: 95806 - DNA, 600 bp, Chicken  19866894618648_4
gggccgtaatgccgcctcagcagaaagtgctgcaggaatcaaagagcagctgagtcaccatccgccagggagttgggtaaacatgacagcaggcatcggctggggacttcttgttaagaaataccaggcaccaggggagcgctccctttggcagctgccggatgcttccaaagtgagctctgcagctgaacgctgcctggtagcaccactcaaggtagatcacagagagcagctctctatctgaaaagaagaagagggraaaatgttttctccttgagtgcaccagggtgagttcttggyatggccagattatgccatttcagtagaacagtgcaagaaaagataaaccaaagtcctttgcaaacacatcaggagtgtgtgcaaaacccaaacagaaaacactgggagcgttcacgcagggctggccaaggccccagcacagaagcagcttttgttcagcagcaattagtgcattccttcagagccaagggctttccttgttgctgcccctgcccaactgctcccaccgggatgcctgggcagggggagtgatgatgtatggcatcacaaaaacaggctggggatgcttgggatgctgtc

SEQ ID NO: 95807 - DNA, 599 bp, Chicken  19866894618653_1
  misc_feature (1)..(129): n is any nucleotide
nnnnnnnnnnnnnnnnnnnnnnnnnnnnnnnnnnnnnnnnnnnnnnnnnnnnnnnnnnnnnnnnnnnnnnnnnnnnnnnnnnnnnnnnnnnnnnnnnnnnnnnnnnnnnnnnnnnnnnnnnnnnnnnnnttcccagcatgtatatgtaacacaggacactgtctgctaaaaaagcagcaccttaatgctattcaagagaatctgtatttactaacatagaggaaaaacctcactaactagtcaaactcaatgcctggtagagaaccaatggtaactaagtattttaactcactgtaggasatgacagcacagtatgaagaataagcagtagtatccacaaggtatcagaagttactgtttttcttccttctcagattaatacaactccatttgtacagaaacatacacagcaattaaaaaaaaaagacccagcttcaaacaaattcctgttcataagaacatgctcatgagaaaaaatattttaggaaaagcattagtgaaagtgcacagttgcttaaaaataatgccacagtgcccaactgctcctcaggaatagaggtatttcaagattgtgtcacttaagtcctcagtcaagaggg

SEQ ID NO: 95808 - DNA, 600 bp, Chicken  19866894618661_1
accacgatttcccagtctacaatcctgccctcctcaacctgccaaaatccgtcctgtccaagaaaatgtctgggtttaaagtctattccctcggcgagggtgagctcccattcccttggcttctcctcttgttccccctcctcctgtcccagtgttttccccccctccctccaggctccatcccatgctgggctcccagccggtctctccggatttgcgtgcatttgtcgcgggcaagccgggcgctggttcccaacccacagcagaaccgccctgctgcaagcaggagcacgtcgggcrcgtccgtgggatggggctgtgctggcagcactgggaaggggaacatctcaccccttttcctgcagaaaacaccaccaacaactccacgggggcagtccagggctgtcatcgccgcggccgcccgccggcgcgacaacagccataatgagtactactatgaggaggcagagcatgagcgcagggtgcggaaacgccgtgccaggtatgggggcatcaggggggagcggtccatggggggctctaaagaaccatcccaggatccccctctccagggagctgggatggaggggacagccctgg

SEQ ID NO: 95809 - DNA, 600 bp, Chicken  19866894618666_1
tctaagtgatgtacatgattctatcttgtatgtgtgaagtgaagacttttgtcttcacatgtgtaaagtgagctcttttaatgcagtggagaatcagaaaatgtatgtgcaattacatttgctgtgagttctgtgctactgaaataatagagaactccctattggtgttacagggaaaaagattaacgtacaacaatgcaacattcatccagcatcctgctctgtatctgcagctcaggaattaccttcatttatcaactgtaaggtgatcttaataaatctgttcattacttaagctcyccttaaagtacaaaacaatcaatgacactattttaatcaagaaagaccaatgtattcttatggtagcagcatttgcttgtcttataaaaaaatcacctcagatacctaaacgacactttgtcatgtcattggtattaaggttactgattcttgcttccttgtgcttcattgcttaactgtggcctaaagattggtaatcactaatgatagaattaagtgagtgttgtaccagacagttaatgagtagggacagatctgcagcagaaacatttacaattcagaactgacacctcattgctc

SEQ ID NO: 95810 - DNA, 599 bp, Chicken  19866894618694_1
  misc_feature (1)..(20): n is any nucleotide
nnnnnnnnnnnnnnnnnnnntaccatattttttttagccattttcacaagtgcttgtacacacggaaggctcctctgattctgtatatgaagtgtgctgagggttgaattttacctttctcatggcatgagttcttctgtgtcccatgtagacgataaatgcttaactaggaattcccaggacacgtcttgtttctctgaccacgtgcatagaagcagaaagagcttggcatgctctttagagaagagcaaaagcagccaattatgttattcaggaggcataactgcatttctgaattcraaagtttgaagaagcagaaacgatcttaaagaatcatggacaacagcagaagacagctcttactccttcctatcaaactttgcacgtatcatgtgtccttgtgtttagattatggaaaggagtttrgtgrtgcatggagaagagcttgtgtttctatggttgatggagaggctgctggttttgcactgacctggctgggagatgtgcttgcaaatcatgtgcttctgccttyctgtctgycttctgctgtgctgaggggatcttagggcatcagggtgtttggccttcgttcagaaaga

SEQ ID NO: 95811 - DNA, 600 bp, Chicken  19866894618694_2
atgagttcttctgtgtcccatgtagacgataaatgcttaactaggaattcccaggacacgtcttgtttctctgaccacgtgcatagaagcagaaagagcttggcatgctctttagagaagagcaaaagcagccaattatgttattcaggaggcataactgcatttctgaattcraaagtttgaagaagcagaaacgatcttaaagaatcatggacaacagcagaagacagctcttactccttcctatcaaactttgcacgtatcatgtgtccttgtgtttagattatggaaaggagtttrgtgrtgcatggagaagagcttgtgtttctatggttgatggagaggctgctggttttgcactgacctggctgggagatgtgcttgcaaatcatgtgcttctgccttyctgtctgycttctgctgtgctgaggggatcttagggcatcagggtgtttggccttcgttcagaaagagctgctgggaaaaggtataaagagraaatctttgcgtttgttgttgctttgtaaagcatgtgattgtttttcttttcttttatctctgatctgcacttttttctcatatggaataagcaataagtgc

SEQ ID NO: 95812 - DNA, 600 bp, Chicken  19866894618694_3
gttcttctgtgtcccatgtagacgataaatgcttaactaggaattcccaggacacgtcttgtttctctgaccacgtgcatagaagcagaaagagcttggcatgctctttagagaagagcaaaagcagccaattatgttattcaggaggcataactgcatttctgaattcraaagtttgaagaagcagaaacgatcttaaagaatcatggacaacagcagaagacagctcttactccttcctatcaaactttgcacgtatcatgtgtccttgtgtttagattatggaaaggagtttrgtgrtgcatggagaagagcttgtgtttctatggttgatggagaggctgctggttttgcactgacctggctgggagatgtgcttgcaaatcatgtgcttctgccttyctgtctgycttctgctgtgctgaggggatcttagggcatcagggtgtttggccttcgttcagaaagagctgctgggaaaaggtataaagagraaatctttgcgtttgttgttgctttgtaaagcatgtgattgtttttcttttcttttatctctgatctgcacttttttctcatatggaataagcaataagtgcgaag

SEQ ID NO: 95813 - DNA, 600 bp, Chicken  19866894618694_4
gctctttagagaagagcaaaagcagccaattatgttattcaggaggcataactgcatttctgaattcraaagtttgaagaagcagaaacgatcttaaagaatcatggacaacagcagaagacagctcttactccttcctatcaaactttgcacgtatcatgtgtccttgtgtttagattatggaaaggagtttrgtgrtgcatggagaagagcttgtgtttctatggttgatggagaggctgctggttttgcactgacctggctgggagatgtgcttgcaaatcatgtgcttctgccttyctgtctgycttctgctgtgctgaggggatcttagggcatcagggtgtttggccttcgttcagaaagagctgctgggaaaaggtataaagagraaatctttgcgtttgttgttgctttgtaaagcatgtgattgtttttcttttcttttatctctgatctgcacttttttctcatatggaataagcaataagtgcgaagttaattactcttgactttataacttctcccatgagtcactctctctattttttgcagatattttccaagagtataattatttcgcaactttttttttctagc

SEQ ID NO: 95814 - DNA, 600 bp, Chicken  19866894618694_5
gagaagagcaaaagcagccaattatgttattcaggaggcataactgcatttctgaattcraaagtttgaagaagcagaaacgatcttaaagaatcatggacaacagcagaagacagctcttactccttcctatcaaactttgcacgtatcatgtgtccttgtgtttagattatggaaaggagtttrgtgrtgcatggagaagagcttgtgtttctatggttgatggagaggctgctggttttgcactgacctggctgggagatgtgcttgcaaatcatgtgcttctgccttyctgtctgycttctgctgtgctgaggggatcttagggcatcagggtgtttggccttcgttcagaaagagctgctgggaaaaggtataaagagraaatctttgcgtttgttgttgctttgtaaagcatgtgattgtttttcttttcttttatctctgatctgcacttttttctcatatggaataagcaataagtgcgaagttaattactcttgactttataacttctcccatgagtcactctctctattttttgcagatattttccaagagtataattatttcgcaactttttttttctagctgggtttc

SEQ ID NO: 95815 - DNA, 542 bp, Chicken  19866894618694_6
cttaaagaatcatggacaacagcagaagacagctcttactccttcctatcaaactttgcacgtatcatgtgtccttgtgtttagattatggaaaggagtttrgtgrtgcatggagaagagcttgtgtttctatggttgatggagaggctgctggttttgcactgacctggctgggagatgtgcttgcaaatcatgtgcttctgccttyctgtctgycttctgctgtgctgaggggatcttagggcatcagggtgtttggccttcgttcagaaagagctgctgggaaaaggtataaagagraaatctttgcgtttgttgttgctttgtaaagcatgtgattgtttttcttttcttttatctctgatctgcacttttttctcatatggaataagcaataagtgcgaagttaattactcttgactttataacttctcccatgagtcactctctctattttttgcagatattttccaagagtataattatttcgcaactttttttttctagctgggtttctttacatgtttcatcctagctttgca

SEQ ID NO: 95816 - DNA, 600 bp, Chicken  19866894618710_1
aaatgtaaatccagcttttcatttttatttgctttaaaagctcaattaaaatttcttcttaaaagactgatagagtcccgaggaaggaggattacattgggcccttgggtaagtaatagagtatcttaaaacgaactaaggacaggtgctggcagtgtggagatcaaaatacgaatccaattagtattttttgatgagtgcgtgatcatgggcttgtcaccagttctatcaacaactaagcaaatattagtctacgtattttccagctcagctctatagacctgatacatccatatcatygttccgacaacactgctgtagtaatatcatatgcttcattactgtaccaaaaaatacttacgggtatacaattgccaaattcacttggaagaggatagacttgatttttttaaattattatttatttatttaatgttctgcaagagtagctgtcaatacagtttgtcactctcttgcttatcaaaaatacataaactggtggatgatttttcttactgttgtggggaaaaagactccctgacaataattgtccttaacgtgacctttcaaggcactcttgactgttcaacacagatttca

SEQ ID NO: 95817 - DNA, 599 bp, Chicken  19866894618725_1
  misc_feature (1)..(159): n is any nucleotide
nnnnnnnnnnnnnnnnnnnnnnnnnnnnnnnnnnnnnnnnnnnnnnnnnnnnnnnnnnnnnnnnnnnnnnnnnnnnnnnnnnnnnnnnnnnnnnnnnnnnnnnnnnnnnnnnnnnnnnnnnnnnnnnnnnnnnnnnnnnnnnnnnnnnnnnnnnnnnnntttttcctttttcctttttcctttttcctttttcctttttcctttttgcctttttcctttttcctttttcctttttcctttttcctttttcctttttcctttttcctttttcctttttcctttttcctttttcctttttcytttttcctttttcctttttcctttttccttttcctctcctctcctcaaaatacatttgccctcaatcatacccataagtttaatgatagattttctttggaatgcttgatgttgtaaaaggctgccaagggaggtggtggagtcatgctctctggaggtgttcaagaaatgtgcagatatggcacttagggacayggtttagcgggcacggtgttgattggtcagctgctggattagatgatcttaggggtcttttacaataatgattctatgtgaaagatacgtcaccatctgcttca

SEQ ID NO: 95818 - DNA, 600 bp, Chicken  19866894618725_2
ttttcctttttgcctttttcctttttcctttttcctttttcctttttcctttttcctttttcctttttcctttttcctttttcctttttcctttttcctttttcytttttcctttttcctttttcctttttccttttcctctcctctcctcaaaatacatttgccctcaatcatacccataagtttaatgatagattttctttggaatgcttgatgttgtaaaaggctgccaagggaggtggtggagtcatgctctctggaggtgttcaagaaatgtgcagatatggcacttagggacayggtttagcgggcacggtgttgattggtcagctgctggattagatgatcttaggggtcttttacaataatgattctatgtgaaagatacgtcaccatctgcttcataatcctaccaatattcccgcccccttcctttttttttcccaataagcaagtttatttctatctaaagtgctttctgtctgctgctaacctcctctgagtttgccacatcccatcttttctatctcattctggctctaagctctcagcttcccatgctcagtcacccagtttattgactgtctgaattgctgcttc

SEQ ID NO: 95819 - DNA, 373 bp, Chicken  19866894618725_3
ggtcagctgctggattagatgatcttaggggtcttttacaataatgattctatgtgaaagatacgtcaccatctgcttcataatcctaccaatattcccgcccccttcctttttttttcccaataagcaagtttatttctatctaaagtgctttctgtctgctgctaacctcctctgagtttgccacatcccatcttttctatctcattctggctctaagctctcagcttcccatgctcagtcacccagtttattgactgtctgaattgctgcttcactcctgtgtggtggtgcggagcrtgctgcaatgctcctgctcccctgtgttcctcatccactgcagtattctgacttacagcctctcttctctcat

SEQ ID NO: 95820 - DNA, 600 bp, Chicken  19866894618742_1
ttcttctgtaaaagccaaagggtatcaaccaggatatggcatgaaccaagcaaacaaaatcactaaggaagaaatacgctcacatgttctcctacagaagtggaactgcagcatggctgtacctgccccttgtctcagccctcgtgcccttccctttcagatgtccgtgctcctcccagccagctgatagccccagataaaacaacacatgatgtggaatcaccgcaggacccgtctggcagctccatcctgcagctccatcctttgcctctccctgggcaaacatcctcgactctccgycacactaaatatggacctgcaagatccccacagcaggtgtgagcaaatgtgctcttcccawccccggctctccccttcccctgcccatctccagaataagaagcagcggctcctgatgttctcctcctatctgcttttacatgtgggccgggaggtacatctcactgccccgggcagcactggggagccaggcaggacagcaggatgtgaatgtggagaaatgcagcatcaccgatctcacattcctcagcgctgcgggatgacctgagcctgagggcagcaatgaggggagcacagctc

SEQ ID NO: 95821 - DNA, 570 bp, Chicken  19866894618742_2
actaaggaagaaatacgctcacatgttctcctacagaagtggaactgcagcatggctgtacctgccccttgtctcagccctcgtgcccttccctttcagatgtccgtgctcctcccagccagctgatagccccagataaaacaacacatgatgtggaatcaccgcaggacccgtctggcagctccatcctgcagctccatcctttgcctctccctgggcaaacatcctcgactctccgycacactaaatatggacctgcaagatccccacagcaggtgtgagcaaatgtgctcttcccawccccggctctccccttcccctgcccatctccagaataagaagcagcggctcctgatgttctcctcctatctgcttttacatgtgggccgggaggtacatctcactgccccgggcagcactggggagccaggcaggacagcaggatgtgaatgtggagaaatgcagcatcaccgatctcacattcctcagcgctgcgggatgacctgagcctgagggcagcaatgaggggagcacagctctggatgccattcctcaccccacaaagccctt

SEQ ID NO: 95822 - DNA, 600 bp, Chicken  19866894618747_1
atcacttaaaaaagagacaacctagaaataatccctcctcccctttaaaggtgaaaaggtaactccatttttatcactctcatgtgcaaaggcaaattagcgctgattaatcaagtcacagataaacgcgcccatcccatagcacggacggacgtgggcagctccctcccaccctccacggagcgcctgacgcagcccactgcagtgcatcagctgcccctgcgtgcccagctctgtgctgcgatgggacagccgtgctcagggctgtgcccgcgccctgtgccagccccagcccagccscagccatagggctctgcccaccagcagcgggcggctggcagccagcgaggctttggcaggattcagtggcggctgcaacgcattcatcatctgctaaaccaatccgccagctccacaccaccatttgtcattaattatgctaatcagcaaaccattactctctgatgacaccgcggcacttattagctagttatggcttctcaaaagcgcggcttattgtgcatgcgagtgctgagcatacattagcctacagggaagaaatgtccaattacgaaaagaagaaatttgctattatctctt

SEQ ID NO: 95823 - DNA, 599 bp, Chicken  19866894618759_1
  misc_feature (1)..(179): n is any nucleotide
nnnnnnnnnnnnnnnnnnnnnnnnnnnnnnnnnnnnnnnnnnnnnnnnnnnnnnnnnnnnnnnnnnnnnnnnnnnnnnnnnnnnnnnnnnnnnnnnnnnnnnnnnnnnnnnnnnnnnnnnnnnnnnnnnnnnnnnnnnnnnnnnnnnnnnnnnnnnnnnnnnnnnnnnnnnnnnnnnnntgtgtttctgcgttcgctgggtgtctctccatgatgatgcacttgctctggcatctcatccctggagaacagtgctgttacggagtcacccttctttcccccagccctcctcctcctcctsggcacacagtgggaattgtttcctgtcccacagttatgctgtgctggggacactgtgctgagcagcttgtcttagtgcacaggggagcatgggaccagggctggtgggtgctggggctctgctgcccagggcaggtgccggggaactagggggaccaggaccataccactatgtgccatctggtcctgcagtgctgatgggctgcactaaaatctgcccctctgtaccccagcccctaggtggacgctgctgaggctggctgcttgaattcaaagcaaaaccatgaataaattaaaccc

SEQ ID NO: 95824 - DNA, 600 bp, Chicken  19866894618764_1
ctcgggtaccgctgtgcagctgtgcaagcatccagaggtaaccaggtactttggaaacacttttaaagctagtaataacttactcacatagatcatacgtcaaaatagtaggagggctctaagggaagctaacaaaagccagggaagtctgactgagggactgattgtagggaaaacgttcgttgctggggaatagattgtacttcagagcaagtcaagtgccaagttttacttctcttccaaacacagatgtgtgccctctgagagggacggtgcaacacagaatttcagtctcattcytaagaatacttgaatattcagctcagggagagcaagaatgagccacgtgctcacgtacacattggctgtttttgcagttgtctaaatgcatggcaaaactcttcaccttcccaccgtacacagacatagaagaatacatgtgatttgtgcaagtgtccagcatatgaatttcctgcaggccatattgaagggrgatgttgcagacatggattgactcctgatttggaaccacccagctctggcacatctcagacccttggcattatttttatgtattccgaacatgatcttttccctacc

SEQ ID NO: 95825 - DNA, 600 bp, Chicken  19866894618764_2
tagattgtacttcagagcaagtcaagtgccaagttttacttctcttccaaacacagatgtgtgccctctgagagggacggtgcaacacagaatttcagtctcattcytaagaatacttgaatattcagctcagggagagcaagaatgagccacgtgctcacgtacacattggctgtttttgcagttgtctaaatgcatggcaaaactcttcaccttcccaccgtacacagacatagaagaatacatgtgatttgtgcaagtgtccagcatatgaatttcctgcaggccatattgaagggrgatgttgcagacatggattgactcctgatttggaaccacccagctctggcacatctcagacccttggcattatttttatgtattccgaacatgatcttttccctacccagcttacctaaacccgcatcgttccagatatctgacctctccaatggataattctgcatttacaacatggaacttgtctgacaagtgggaaaacagcatcctatgcattataatacagattggttttctgcctccgctcacctgtgccccaaatgatttcacgtatctggctgcagcagttctactgctgcc

SEQ ID NO: 95826 - DNA, 600 bp, Chicken  19866894618768_1
cacagacctgttggagcgtgtccagaggagggccacaaaaatgatccaaaggatggaaccccactcccacgaggacaggctgagagagctgggtccattcagcctggggaagagaaagctctgaggtgacctgagaacagtctttcagtatctgaaggagagctaaaggaaagaaggggacagagtctttagcaaagtctgtgatgacagaacaaggagaaatgtcttcaagctcaaagactatagatttaggtcggatataaagaaaaagacttttacagtgagggtggtcttttacaytgaggtggaaaaagtctttttccaatgaggcactggaacaggttgcccagtgatgtggtggatgccccgtccctggagactttcaagtccaggctggatcaggccctgagcaacctgatctagttgtgcatttccctgttcattgcagggcagttggactagttggtctttaacggtcccttccaattctaaggcttgtctgattctaacatatacaggaagcgttgctttcttggttagaatgagttagaagrcatactatgaataaatcaaggctcagagttcaggtggtgtggatgg

SEQ ID NO: 95827 - DNA, 600 bp, Chicken  19866894618768_2
cggatataaagaaaaagacttttacagtgagggtggtcttttacaytgaggtggaaaaagtctttttccaatgaggcactggaacaggttgcccagtgatgtggtggatgccccgtccctggagactttcaagtccaggctggatcaggccctgagcaacctgatctagttgtgcatttccctgttcattgcagggcagttggactagttggtctttaacggtcccttccaattctaaggcttgtctgattctaacatatacaggaagcgttgctttcttggttagaatgagttagaagrcatactatgaataaatcaaggctcagagttcaggtggtgtggatggggagagctgsagtctgcttcctttagtacgctgaatttctgactgcatttcagatgtgggccctgaggacatccccagtgagtacagttttactaagccctttaaaagccctgtaatttttaattacagctttgtgcctgatgaagaacagcaaaattatggctgtgactagacagcaaatagggcatgacagatgttgaaaggtatagtttttgaaacttaatgttacatgatagctagtgaaacctggtatt

SEQ ID NO: 95828 - DNA, 578 bp, Chicken  19866894618768_3
aaagtctttttccaatgaggcactggaacaggttgcccagtgatgtggtggatgccccgtccctggagactttcaagtccaggctggatcaggccctgagcaacctgatctagttgtgcatttccctgttcattgcagggcagttggactagttggtctttaacggtcccttccaattctaaggcttgtctgattctaacatatacaggaagcgttgctttcttggttagaatgagttagaagrcatactatgaataaatcaaggctcagagttcaggtggtgtggatggggagagctgsagtctgcttcctttagtacgctgaatttctgactgcatttcagatgtgggccctgaggacatccccagtgagtacagttttactaagccctttaaaagccctgtaatttttaattacagctttgtgcctgatgaagaacagcaaaattatggctgtgactagacagcaaatagggcatgacagatgttgaaaggtatagtttttgaaacttaatgttacatgatagctagtgaaacctggtatttaacaatatctaaaaacatcaaaaacatctacaa

SEQ ID NO: 95829 - DNA, 600 bp, Chicken  19866894618772_1
gcttttccttggtctatctaccagcactgttatctccagcattgcaggagccttgaaagagataacaagataacactgaggtgatggcaattctaacaaaaacagcagaaaagcacacgaaaacccagcacaccaaaaccacagctcatgagatgccaagaagcagtgagatgctttgtgctctttaacatctagcttcaatatggatgaaaattcattcgtctaatcttttgatgaaaccaaattatcacaggtttcttttgtaatcactaaagcagatggcttggttctcctagatayaggacagcattagaaacatcgtaagagttacaaagccacacacaaatctctcatcatcttcattctaaaaaagtttacattctctttatgagctgctaataacttcatgaaatttagaaattaattataagctacagatccctaaaggtaaattacccaaactaattgtaattgcacagttgcactatggcccatattaaaacatccatccgagtatggattgcttgtaggctccacatagagcctttctttttttaaatatattgtaattaattggcacagcactgaattggctgaaat

SEQ ID NO: 95830 - DNA, 599 bp, Chicken  19866894618796_1
  misc_feature (1)..(227): n is any nucleotide
nnnnnnnnnnnnnnnnnnnnnnnnnnnnnnnnnnnnnnnnnnnnnnnnnnnnnnnnnnnnnnnnnnnnnnnnnnnnnnnnnnnnnnnnnnnnnnnnnnnnnnnnnnnnnnnnnnnnnnnnnnnnnnnnnnnnnnnnnnnnnnnnnnnnnnnnnnnnnnnnnnnnnnnnnnnnnnnnnnnnnnnnnnnnnnnnnnnnnnnnnnnnnnnnnnnnnnnnnnnnnnnnnnntctgtcagttaaacattaggagctttggtgcacctttcaaagctgtctgactggggatcttttttttccactrtagcaagatatttcattgttcataatgkgagcaattaatagtgtcataacccaggcagcctaatgcaagaagtaccatttcatgatactgttcrgacgtaaagagcaaaaaggttaaaaaaaaaataacgatagactttttaaaaatagatcttgtctttgacggaaacagacccacctcctgtgtctgttgcctcagaaggaaggcggaggccctgcagaagcaaaagttgatactgagtttgattgcagggaaactgtaccaagaattttgattagtcttcagctggtgtaaacaag

SEQ ID NO: 95831 - DNA, 599 bp, Chicken  19866894618796_2
  misc_feature (1)..(199): n is any nucleotide
nnnnnnnnnnnnnnnnnnnnnnnnnnnnnnnnnnnnnnnnnnnnnnnnnnnnnnnnnnnnnnnnnnnnnnnnnnnnnnnnnnnnnnnnnnnnnnnnnnnnnnnnnnnnnnnnnnnnnnnnnnnnnnnnnnnnnnnnnnnnnnnnnnnnnnnnnnnnnnnnnnnnnnnnnnnnnnnnnnnnnnnnnnnnnnnnnnnnnnntctgtcagttaaacattaggagctttggtgcacctttcaaagctgtctgactggggatcttttttttccactrtagcaagatatttcattgttcataatgkgagcaattaatagtgtcataacccaggcagcctaatgcaagaagtaccatttcatgatactgttcrgacgtaaagagcaaaaaggttaaaaaaaaaataacgatagactttttaaaaatagatcttgtctttgacggaaacagacccacctcctgtgtctgttgcctcagaaggaaggcggaggccctgcagaagcaaaagttgatactgagtttgattgcagggaaactgtaccaagaattttgattagtcttcagctggtgtaaacaagagagaggtgaagaatggagaaccttatg

SEQ ID NO: 95832 - DNA, 599 bp, Chicken  19866894618796_3
  misc_feature (1)..(133): n is any nucleotide
nnnnnnnnnnnnnnnnnnnnnnnnnnnnnnnnnnnnnnnnnnnnnnnnnnnnnnnnnnnnnnnnnnnnnnnnnnnnnnnnnnnnnnnnnnnnnnnnnnnnnnnnnnnnnnnnnnnnnnnnnnnnnnnnnnnnntctgtcagttaaacattaggagctttggtgcacctttcaaagctgtctgactggggatcttttttttccactrtagcaagatatttcattgttcataatgkgagcaattaatagtgtcataacccaggcagcctaatgcaagaagtaccatttcatgatactgttcrgacgtaaagagcaaaaaggttaaaaaaaaaataacgatagactttttaaaaatagatcttgtctttgacggaaacagacccacctcctgtgtctgttgcctcagaaggaaggcggaggccctgcagaagcaaaagttgatactgagtttgattgcagggaaactgtaccaagaattttgattagtcttcagctggtgtaaacaagagagaggtgaagaatggagaaccttatgctgtgctttgggctatctgcttccccygatgcttggcatttggagcaatctggtgcattcaaacaa

SEQ ID NO: 95833 - DNA, 600 bp, Chicken  19866894618796_4
gcagcctaatgcaagaagtaccatttcatgatactgttcrgacgtaaagagcaaaaaggttaaaaaaaaaataacgatagactttttaaaaatagatcttgtctttgacggaaacagacccacctcctgtgtctgttgcctcagaaggaaggcggaggccctgcagaagcaaaagttgatactgagtttgattgcagggaaactgtaccaagaattttgattagtcttcagctggtgtaaacaagagagaggtgaagaatggagaaccttatgctgtgctttgggctatctgcttccccygatgcttggcatttggagcaatctggtgcattcaaacaacaaaacactttttcttctgaagcattttgagagatgaggttgaagttctcttggcaggactagtttggtagccacagaggatctgacctccatctcaggcaactgtgccaacaccagctttgctttgctggagaacagaactgctccttcctgacagcccctggcctttgccagaggaagctggatgggaaggtagcagtgtgacttacttcaggtggggacagcgaggcatggcaaagaacaattacaagtaccattgtt

SEQ ID NO: 95834 - DNA, 600 bp, Chicken  19866894618799_1
ttagtataaaggaataatacaaagaaaccaatgatccggaaaaagtatcttgatgaatgggctaaatgaattcatcactaacagcagtatctttccattttaaagaaaaatttgagtgtctaagtgaagacaatttaatcaaatttacaatccatgaagaagagagaagaaatagaatgtattttttgccatctcacagaactgtaactgattcctagacagagcaaagactgaacaggttgtccctgtgctcgtgacctgcaaaagctccttgggactgaacaatattcctcttcatcrctttatgacatcgagctgatttccaccaagattaaaaaccatttgcataatttacacgtaatttactgcagagaaggtaaccttataaatgtttgaagctatctttcatccgtttaaaaaaaaagttatagtaaaagctgaagttttaattttttaaaagcccaagatgcgtcttgaaaccgatgtagaaggatgttgtataaccgtgctggaagtgtggtgccttatcaggaaggctggatgtgtagggaaagctgcacagatgacaacgtctggtctgcctgcatccacatcattata

SEQ ID NO: 95835 - DNA, 600 bp, Chicken  19866894618809_1
gtatcagcattacatgctatgtgtgatggttgtgctgtgtatgtggggcaatggccttgcttcgtcttgatgtcagcagttaagtgcaggattgtatgtgtgaatggcaaagtcagctggaggagatgtttttcagcattgtatgaagtagttcccaaatagctctgttctgacaattgtgaagagaaatgacagctttcctcaggcatttgtctaattgaggaaatgagcttctagcagcctcactgctgaagttggggataattgaggtgatggacaggagtggtatttttaaagcartctctctacactagctgtaaaatgagtttactagttgcagaaaacctttcctgtccttctgtcattcagtggctatggggagggggggaattaatcttagctatgctcatgacttttaaagagggctttgaggatttgtcacaactgtgtgtaggcagttttgtgtcttcccaaatgcacacactgagaaacttctgccatgtttctttttgtgtgggtctgggttaaatacagcaaactggactgactcgagctagtgaagcagatattttagctgagtaggaaagaatgtactgttca

SEQ ID NO: 95836 - DNA, 600 bp, Chicken  19866894618824_1
gtttgagacgttatagctcacaatcaagagagaaggaaaacgctgccatttcaccatcactgctgctgggaactcttatttttttaaaaaagcacaatttcctgagggcagcacagcagtcagggcccctgagtttctggtcccacgtaccattctgcacccacatctgcccgcagtgctcagggctgagctccggaaaaagggaggccagtgaatgagaggcccggcggcaatttgcggtgtgggagagctgggaaaaatgggatgaaaacatccttgttatatttcagcttcacttgyrcagctcagtttcacaagacaaagaataacagtttgagccatttgcattcagatacgtttgcgctgggatttggagccttgcactcagaatgccccgcagaccttcagcagagcaccactcaacctggaggaataagtcccaacacacaactgccacagcccatgctttagcactcggtagagtgtcttggtgggagctatgcagctggtaggtcaagcttctttatataggcaacagcaggaagacagagccattctatcagaattaagggatctgtgatttttattgacctgtttatc

SEQ ID NO: 95837 - DNA, 600 bp, Chicken  19866894618824_2
tttgagacgttatagctcacaatcaagagagaaggaaaacgctgccatttcaccatcactgctgctgggaactcttatttttttaaaaaagcacaatttcctgagggcagcacagcagtcagggcccctgagtttctggtcccacgtaccattctgcacccacatctgcccgcagtgctcagggctgagctccggaaaaagggaggccagtgaatgagaggcccggcggcaatttgcggtgtgggagagctgggaaaaatgggatgaaaacatccttgttatatttcagcttcacttgyrcagctcagtttcacaagacaaagaataacagtttgagccatttgcattcagatacgtttgcgctgggatttggagccttgcactcagaatgccccgcagaccttcagcagagcaccactcaacctggaggaataagtcccaacacacaactgccacagcccatgctttagcactcggtagagtgtcttggtgggagctatgcagctggtaggtcaagcttctttatataggcaacagcaggaagacagagccattctatcagaattaagggatctgtgatttttattgacctgtttatca

SEQ ID NO: 95838 - DNA, 600 bp, Chicken  19866894618831_1
tctcatctgaacagccctggaatctacagaacataccagctaacatgtacgggagtcatttccttgtatgtaggcattctagatgatctagatctcttcagactaccaatattggaatagttagaatgcttcaacagtctagtaaatattgtgtaggaactatggtagacacagatccttggggatctggattgctcttgagctcaattacacatctgaggtgtttgcttaagtgaaaatcatagaatcatagaatggcttgggttggaagggatgtcaatgatcatcaggttcttacckctatgctgcaggcgarttgctagccactagatcaagtacaagattaggttgcccagagctccatcaaacctggccttgagyacatccaggtgcagagcattcacagcctctctggtcaacctgttccagcacctcaccaccctttcagtgaaaaaatagtatctctcaaagtgtaacaacaggttggtgatagtgacctcactggaaaaagaaaaaagaaagaaaaagaagaaaagctatcctccttgaatttcttttgctttttctttccaccttcagctggacaagggtgagcattta

SEQ ID NO: 95839 - DNA, 600 bp, Chicken  19866894618831_2
ctggaatctacagaacataccagctaacatgtacgggagtcatttccttgtatgtaggcattctagatgatctagatctcttcagactaccaatattggaatagttagaatgcttcaacagtctagtaaatattgtgtaggaactatggtagacacagatccttggggatctggattgctcttgagctcaattacacatctgaggtgtttgcttaagtgaaaatcatagaatcatagaatggcttgggttggaagggatgtcaatgatcatcaggttcttacckctatgctgcaggcgarttgctagccactagatcaagtacaagattaggttgcccagagctccatcaaacctggccttgagyacatccaggtgcagagcattcacagcctctctggtcaacctgttccagcacctcaccaccctttcagtgaaaaaatagtatctctcaaagtgtaacaacaggttggtgatagtgacctcactggaaaaagaaaaaagaaagaaaaagaagaaaagctatcctccttgaatttcttttgctttttctttccaccttcagctggacaagggtgagcatttaacaaattcaaattccc

SEQ ID NO: 95840 - DNA, 600 bp, Chicken  19866894618831_3
gatgatctagatctcttcagactaccaatattggaatagttagaatgcttcaacagtctagtaaatattgtgtaggaactatggtagacacagatccttggggatctggattgctcttgagctcaattacacatctgaggtgtttgcttaagtgaaaatcatagaatcatagaatggcttgggttggaagggatgtcaatgatcatcaggttcttacckctatgctgcaggcgarttgctagccactagatcaagtacaagattaggttgcccagagctccatcaaacctggccttgagyacatccaggtgcagagcattcacagcctctctggtcaacctgttccagcacctcaccaccctttcagtgaaaaaatagtatctctcaaagtgtaacaacaggttggtgatagtgacctcactggaaaaagaaaaaagaaagaaaaagaagaaaagctatcctccttgaatttcttttgctttttctttccaccttcagctggacaagggtgagcatttaacaaattcaaattcccggtgttaaaagcaaagctacggaatcagttcaggagaattatttctgtacaattacatgctgtgc

SEQ ID NO: 95841 - DNA, 413 bp, Chicken  19866894618831_4
gaatttcttttgctttttctttccaccttcagctggacaagggtgagcatttaacaaattcaaattcccggtgttaaaagcaaagctacggaatcagttcaggagaattatttctgtacaattacatgctgtgcagccacttgtgaaagtgtaaagtcagcgtaaagcagagaaattgatatgtcaccatctactgatagtggcttaatagaaggtaaaggacaaaaatcagatttatgtaaatgttaccattatcaccccagatacaaagtgaaactgacgtagcttcatatttttttwttattatttttatatttatactgagtaaaatacttttgtcccatgtggtccagaaagtccagctcagatgacaaaaatcagatagtatcttcaaatcaaatacctattgatta

SEQ ID NO: 95842 - DNA, 600 bp, Chicken  19866894618835_1
agcatatcttctattttccagtaagagcagtggttcagattactatctgtattttttacatagaaaaagcaatcaaatataatgcattgcccttccatataaaacttacactctcttcctattattttgactacatgccattaacattcatagaatcatagaatcactaaggctggaaaagactcacaggatcatccagtccaagcattcacccatcatcaatggttctcgctaaaccatgtccctcaacacaacatccaaacgttccttgaacatatccagggttggtgactccaccayctcgctgggcagcccattccagtgcttgaccaccctttcagagaagtagtatttcctaacatccagcctgaaccttccctggtgcagcttgaagccattccctctagtcctatcactagtcacacaagagaagaggccaacccccagctcactacaacctcccttcaggtagttatagagagcaataaggtctcccctgagcctcctcttctctagactgaacaatcccagctccttcagccgctcctcagaaggcctgtgctgcagacccctcaccagctttgctgctggttcmattca

SEQ ID NO: 95843 - DNA, 566 bp, Chicken  19866894618835_2
accayctcgctgggcagcccattccagtgcttgaccaccctttcagagaagtagtatttcctaacatccagcctgaaccttccctggtgcagcttgaagccattccctctagtcctatcactagtcacacaagagaagaggccaacccccagctcactacaacctcccttcaggtagttatagagagcaataaggtctcccctgagcctcctcttctctagactgaacaatcccagctccttcagccgctcctcagaaggcctgtgctgcagacccctcaccagctttgctgctggttcmattcattttgaaatttaaagcacatatatgttagcaatttcaatgtttcattttcaaattttctcttctcaaaactagatcagtaggcttaatttggatacagaaaagaaataaattgaaacctaaggtggctaaaatcttcttaaggttagaggacaacacaggagggtggccacggaaggagcaatgtcatgaaaatataagatgaagaaaagaatctgaacacttcaactgatgctaacacatattttacgtttctccaaagg

SEQ ID NO: 95844 - DNA, 600 bp, Chicken  19866894618842_1
cccacatgtgttgacttagtaaatcagcttagtctttgatcttgttatttggtaggctggaatttgcataccttatatcacatgacacagctcagcactttcagagaagaatatattgaataaatatcaggaggtgggcaatggaaagggaagggagcactgagaaaggcaggcatcacgtttgctgtctatagactctgagtatgtgctttgaatatgttaatcttctcaatttattagcacttaccattggtaaacgcctgctatgcatttcacatcccgggaaaaacaacagaattygtagtagtgtaaaagggagctgagtttgctccaaagttgcattactgtaattagtgatgcctttgtaggaaaatgaatgtgagtggaaaatttcaccctaacatctaatctgtctgccctcttttagtttaaaaccattcccacctagtcctatcactgtctgccagtgtaaaaaatctatatccctcctgattataagctccttttaagtagtggaaggccacaatgaggtctccccagagccttctgcaggctgaacaagcccagctcccacagtctttctttgtgagagagattttc

SEQ ID NO: 95845 - DNA, 599 bp, Chicken  19866894618849_1
  misc_feature (1)..(188): n is any nucleotide
nnnnnnnnnnnnnnnnnnnnnnnnnnnnnnnnnnnnnnnnnnnnnnnnnnnnnnnnnnnnnnnnnnnnnnnnnnnnnnnnnnnnnnnnnnnnnnnnnnnnnnnnnnnnnnnnnnnnnnnnnnnnnnnnnnnnnnnnnnnnnnnnnnnnnnnnnnnnnnnnnnnnnnnnnnnnnnnnnnnnnnnnnnnncagatggtggaaagcagtcctaggagagctctgtcaaacagaataatgctgtaacaagcattttccataatattacattgtgaagacattaattattgctgctactgcctayaatatcttgctaaagaaattctgaaacagtttcttcatgttttcaaaaatcaaattaaaagtttgagatcatgtttatgctcttaaaatactggtataatttttttcttctaaaattttcagaagtaatttttttcttgattatttatacaagcaactcataaagctcttgaacagaactgttcatgcacttggaaagaagtgtttaacttgtaagaatacttattacattttcatctaattagtgttggcaaagaaaatattatatactgccactagctcaacagaaagatgtttgct

SEQ ID NO: 95846 - DNA, 600 bp, Chicken  19866894618859_1
ctgtcagtttaatatctagaatctagatactttaagcctggcacttacaaacatgtgactatactgtgtctcccaggtgtctctgaaagatccaatatctttgcatgatacacaggggcataagccaaggagacatttaaatgcatggcttgaatattcagactcaatcatacagccagctatcaataccccaaaaatcatgtgtatatgaaatcaaaaaagcagcatctttcagaaatcgttcttaacttcagaaaagataagaatctattcacttctaatctactccagattaatatyacttaatttagagttatatagtgcttagtacatgtctgctgatatatatataagctgcattttctgtagacactttcaataacttgctttcatctgtgaaagatgttgctaagatccttgttccaaaataagaccaagtctataactctgtgaggtaccattcaaatacaaaatggacatccagccaagatctgaagacagaacatgccatctgacaatttatcaaagtcaacaggccacctcagtttgtatttgcttgtgcaaaaagagatacttgccttctaggtcccagcagaccca

SEQ ID NO: 95847 - DNA, 599 bp, Chicken  19866894618864_1
  misc_feature (1)..(166): n is any nucleotide
nnnnnnnnnnnnnnnnnnnnnnnnnnnnnnnnnnnnnnnnnnnnnnnnnnnnnnnnnnnnnnnnnnnnnnnnnnnnnnnnnnnnnnnnnnnnnnnnnnnnnnnnnnnnnnnnnnnnnnnnnnnnnnnnnnnnnnnnnnnnnnnnnnnnnnnnnnnnnnnnnnnnnnataaagggcttgagttttttttttatgaagagagggtattacttacttgacagtgtctgtatgctttatctgtacatggcctaaacagaaagactcaggaggaaaggatattctgagaaaagctgatatgagtrcagttctctgcaaaatatagatgtggatctgcttgtacctgttttacatgtaagacactttatagaagcaaactgaraatgtggccagtagtgaagagcagcatggaagagagagggaaatgattaaagctacaaaggaagaaaagcctgaagagtgtctgaagagcagatagtttggtaggcagtattgtctgagtgggcagtgacagcagatgagagaatggggaaggaaaattgaaggtaaggatgagtggttttatttttaattggatggggaatctagaaaaaagttgtcagga

SEQ ID NO: 95848 - DNA, 599 bp, Chicken  19866894618864_2
  misc_feature (1)..(89): n is any nucleotide
nnnnnnnnnnnnnnnnnnnnnnnnnnnnnnnnnnnnnnnnnnnnnnnnnnnnnnnnnnnnnnnnnnnnnnnnnnnnnnnnnnnnnnnnnataaagggcttgagttttttttttatgaagagagggtattacttacttgacagtgtctgtatgctttatctgtacatggcctaaacagaaagactcaggaggaaaggatattctgagaaaagctgatatgagtrcagttctctgcaaaatatagatgtggatctgcttgtacctgttttacatgtaagacactttatagaagcaaactgaraatgtggccagtagtgaagagcagcatggaagagagagggaaatgattaaagctacaaaggaagaaaagcctgaagagtgtctgaagagcagatagtttggtaggcagtattgtctgagtgggcagtgacagcagatgagagaatggggaaggaaaattgaaggtaaggatgagtggttttatttttaattggatggggaatctagaaaaaagttgtcaggaagtggcatccaggcagccatttactttcagcatgttcttacatttttcaaagagcttcccatactgaccaaatgttc

SEQ ID NO: 95849 - DNA, 599 bp, Chicken  19866894618865_1
  misc_feature (1)..(53): n is any nucleotide
nnnnnnnnnnnnnnnnnnnnnnnnnnnnnnnnnnnnnnnnnnnnnnnnnnnnntctaagaaaggcagttcttttttctacttccgtcagaaagaatacaggacgtgtattaattctgaagatatccatgtcagtggatgtcacttaaagcaaatgcatctgaatttggcacgtttcaatctaagatcccaacatttctgcattagcagatgggaaaattatccagaaaagctaaattcacaattttttattattattattattattattattattattattattattattattattattwkttgttgttgttgttgtgatgcagttcagctgtggagcttgatgccttgatttcagcactatttgagattaatgcacttcatgggattggcagtggggttcgaactggatgatctttaaggtcccttccaacccaaaccattctatgagagaactcaattgctatgcactccatgcaggctactttgcttgatrgctctattttgaagataagatcagtcaaaaacaaacaatgtgcacttcaagaaatctaggactgcaagtgatatttacactgaagaactggtcagtcagtagaat

SEQ ID NO: 95850 - DNA, 599 bp, Chicken  19866894618865_2
  misc_feature (1)..(52): n is any nucleotide
nnnnnnnnnnnnnnnnnnnnnnnnnnnnnnnnnnnnnnnnnnnnnnnnnnnntctaagaaaggcagttcttttttctacttccgtcagaaagaatacaggacgtgtattaattctgaagatatccatgtcagtggatgtcacttaaagcaaatgcatctgaatttggcacgtttcaatctaagatcccaacatttctgcattagcagatgggaaaattatccagaaaagctaaattcacaattttttattattattattattattattattattattattattattattattattattwkttgttgttgttgttgtgatgcagttcagctgtggagcttgatgccttgatttcagcactatttgagattaatgcacttcatgggattggcagtggggttcgaactggatgatctttaaggtcccttccaacccaaaccattctatgagagaactcaattgctatgcactccatgcaggctactttgcttgatrgctctattttgaagataagatcagtcaaaaacaaacaatgtgcacttcaagaaatctaggactgcaagtgatatttacactgaagaactggtcagtcagtagaatg

SEQ ID NO: 95851 - DNA, 552 bp, Chicken  19866894618865_3
ttctgcattagcagatgggaaaattatccagaaaagctaaattcacaattttttattattattattattattattattattattattattattattattattattwkttgttgttgttgttgtgatgcagttcagctgtggagcttgatgccttgatttcagcactatttgagattaatgcacttcatgggattggcagtggggttcgaactggatgatctttaaggtcccttccaacccaaaccattctatgagagaactcaattgctatgcactccatgcaggctactttgcttgatrgctctattttgaagataagatcagtcaaaaacaaacaatgtgcacttcaagaaatctaggactgcaagtgatatttacactgaagaactggtcagtcagtagaatgtacttgaaaagtgcaaaaacatatcagatgtcctactctattacatacatattttcaaattgtctaatgtaataaaaattgtcattctgcataagaaagattccaaagaggcacagaaacgttcctcatctatggcaatactccta

SEQ ID NO: 95852 - DNA, 600 bp, Chicken  19866894618895_1
gggtgagatgtctggattcagctctggtggcccagggaaggccaactctctgggaaagaaactgtgctggattcagttagtttttaacaaaggaagacaaatggagtgccaggaaacgggatgcaggtctatcagctagaaattcccacagtgatgcccacaacacaggaaggaatgttgtttagtatttatttctggaaaatgtttgttgcgcttcaaaaagagtgactctgatggctttgaggactgttcctatcatcgtatcaattctgatgcctagtgaagaagattcagttttcrgatgcaatgagtctgccaatgcatctatgctcaatggctgtggacagcctgcaaaagaaccctgaggtggacaaattgttgtgaaagctgtgattcttttccctcaaaattcctaataactttttcagtttcactagggcttacaacttcagttagtgtatataaccaatataatttgattttattaaaggtaacattatataatccaaatttatccttttgttacaacttaccagatgatggaaagacactgagtttaaaagcttgccaattttccaagcatatcatctggtccaatga

SEQ ID NO: 95853 - DNA, 600 bp, Chicken  19866894618911_1
gtgcgtgtgctgtcactgtgctgatcggttttggaagtgttgccccataggcccctgcgtgcactgcctagacctgaaacattggggtttgtgcgtgcttaagagggtaagaatgtgcctcaaggtctgaaaacaaaacaaaacaaaaaaatccatcccctgcaaggtgcttcagcactgtaaaaagcatgtgctgttgatttgggagctttaggttagatgttgggaggaagttttccacacagagggtggtgacacactggatcaggttgcccagggaggttgtggatgccccatccmtgcaggcattcaaggccaggctggatgtggctctgggcagcctggtctggtggttggtgaccctacacatagcaggggggttgaaactgaatgatcatcgtggtccttttcaacccgggccattctagggttctgtgatcttacactrctttcaaagcagcccatcatgtgccatacacacgtggctgagtgcgagaatgaaaggaagctcagtctccaggcacggccaatttgctcactgaaatgcaaatgaataatttcttgcttaaattatttgaaataacggtcacagatgtttct

SEQ ID NO: 95854 - DNA, 600 bp, Chicken  19866894618911_2
aaatccatcccctgcaaggtgcttcagcactgtaaaaagcatgtgctgttgatttgggagctttaggttagatgttgggaggaagttttccacacagagggtggtgacacactggatcaggttgcccagggaggttgtggatgccccatccmtgcaggcattcaaggccaggctggatgtggctctgggcagcctggtctggtggttggtgaccctacacatagcaggggggttgaaactgaatgatcatcgtggtccttttcaacccgggccattctagggttctgtgatcttacactrctttcaaagcagcccatcatgtgccatacacacgtggctgagtgcgagaatgaaaggaagctcagtctccaggcacggccaatttgctcactgaaatgcaaatgaataatttcttgcttaaattatttgaaataacggtcacagatgtttctcaaatatttgcttaagaaatttactgaaatacttgggacatgattcaggttaatataccgagcaagaactaaagcattaaatgtatggaaggtgaagggatctggccatacactgaatgctttctggaagagaggtggactttaagtg

SEQ ID NO: 95855 - DNA, 600 bp, Chicken  19866894618914_1
acagtcccaagtctgtgattttcccattccagctgtattttagtattattttaaaatctcatcagttctacttagactgaagtcagtacagtaggactggtgtgggcaatagtgcaacttaacttacttgcaggtttttcttcagtccaaaggtacggtacagtctgctctggtgaactgctatccagccagatacagaattgctgtattgaaagaaaaggtaaagtatttacagaaacggcaaagaaatggagtttcacagcactaaaagtgtgctgtatggtttaggtcctcttcatratgcaacagagatctccagtttcagccttaaaatctagaacttaatgtactgcagtattcagctacttataggctttgggtaataaacaaaagacagctatggtgaagttgaacttgacagaggccaagttctactagcccttcatttgaaacatcccctgtccaccaggagaacttatttgtagcatgaagctcttataaatcagaaagctaaaaagctgagccaagtagttgggtgcaggagaacaacccasccaacgcttacctcatcagcttgaactttggaaacaaggtccttga

SEQ ID NO: 95856 - DNA, 600 bp, Chicken  19866894618914_2
tttcacagcactaaaagtgtgctgtatggtttaggtcctcttcatratgcaacagagatctccagtttcagccttaaaatctagaacttaatgtactgcagtattcagctacttataggctttgggtaataaacaaaagacagctatggtgaagttgaacttgacagaggccaagttctactagcccttcatttgaaacatcccctgtccaccaggagaacttatttgtagcatgaagctcttataaatcagaaagctaaaaagctgagccaagtagttgggtgcaggagaacaacccasccaacgcttacctcatcagcttgaactttggaaacaaggtccttgaaggcaggaaggcagctcagcctcatcattgcttctgtctgctctacagtcaaaccgttgattttggggagggatgcagtgtttagtacaatctcctttcctctcaagaaatgctggaattctgcatcgtatgtaggctccctaatgttaagggaacaaaaaactttagctcaatgctgttttcaacacatccctccctttttcaactcaagtgaggtaagaaaacacttacccaatagtgcctttcagtttaat

SEQ ID NO: 95857 - DNA, 599 bp, Chicken  19866894618936_1
  misc_feature (1)..(121): n is any nucleotide
nnnnnnnnnnnnnnnnnnnnnnnnnnnnnnnnnnnnnnnnnnnnnnnnnnnnnnnnnnnnnnnnnnnnnnnnnnnnnnnnnnnnnnnnnnnnnnnnnnnnnnnnnnnnnnnnnnnnnnnnnaagacctacccccagggaggaagatgcgcatgtatgtgagtacaatggcatcaccacgtactctttactctgtaaagtttttacaccattttccctatccattttaatcacctcccggatcatagcacctaaaaggtctgaaattaccttcaaacaccctcttctgagcatctccatamaaaggtgactgtcttggaaaactattaagtacaggagggagttctggacattatctccacgttacttttcccagttatgttttcagttcccatcttgcctcttctttagagcagacaggacattttctccctcagtttagaaagaaatgtatccatcagcctcacctcattcattcattcaaatcacatgtggcatatgagaggtcagctgggttgaacctaacccttaggaacttgtaaggtaaagaactgtgaaacctacagttctaacagtgagaaaaataacaatgcctgctccc

SEQ ID NO: 95858 - DNA, 600 bp, Chicken  19866894618937_1
ctttttttcccaaaaaggtgtaggtatctccaggcaacagtagtgtctggtggtagagacagtaaatacatggataactactatctcctagcttttgctaaacaaggtaagttgaaacaatcttatcaccactgccatggcaaccttccagccctacaatttggtctgtactaggtgccatattctcttgcatttcaagatgtcatctctcatgcatgaaatgatggaacctctccaacggtgctgagtcatttctgcttggcaggtgctatttaccagctaagcagcatttcttacccrttttagcagggcggttggacttaatgatctcttgaggtctctaccaacccctgcgattctgtgattcagattcagtcactagattgccccctaactctgccttctcagagcaatcagttgctgagcatgtttggcttttaacaagaccgaggaaactactgaagtcaagcagtcaataatccatctctgaacttagaagggaggggaatccctttcaggcagaatatacacaatacaccgcataccacagagctgagtgtagtcctcatgctttgagtatgttaacaagatggccagtgc

SEQ ID NO: 95859 - DNA, 548 bp, Chicken  19866894618941_1
catacccaaaggcctcattctaaataaacccaaaaagcattgcaaccctcaagatagattaacaatatattatctgctcattctcaggcttttcacaacttcactgaaacacttgtcctagaaatcagaaagagaatcagaaagaaaatcagaaaggtctgggtcaaagttgaagctactgttccagccaaattactgggacttgaaaattctgggtaaatatccttctataattggtcttaattgaagaattgagccaacacacctgcctttcctctgcaggtagtgtggcactgtttwgcaaaataagaacctgtaaaacccagcacttcatgtcaaaaggaggccaagtgttcttgaagattcaaagcaaatatttttgctaaccactattccatgaactcatttcattttattttacatactatccactgatattatagtcaaaaatactcataattatcttctagagatatacatttttctcagtgaccataagagagaactaagacaactctaggcacccaatatcattcccttaatattta

SEQ ID NO: 95860 - DNA, 599 bp, Chicken  19866894618946_1
  misc_feature (1)..(229): n is any nucleotide
nnnnnnnnnnnnnnnnnnnnnnnnnnnnnnnnnnnnnnnnnnnnnnnnnnnnnnnnnnnnnnnnnnnnnnnnnnnnnnnnnnnnnnnnnnnnnnnnnnnnnnnnnnnnnnnnnnnnnnnnnnnnnnnnnnnnnnnnnnnnnnnnnnnnnnnnnnnnnnnnnnnnnnnnnnnnnnnnnnnnnnnnnnnnnnnnnnnnnnnnnnnnnnnnnnnnnnnnnnnnnnnnnnnnntgaattctatctgtgtttaccagcttcctggcaccatgatggagcagaagggttgctgtgtagcagctggrctgttgcttctgactagttagctgaatacaacttggtatctgcaccctgaacgtccaacagggaagggaactgtaatctgggacgtaaccaggctatgaatgaggatctctgcagaggcagatttgcaaacagtcattgtctggaaatgtttcaagaatggcaggaggcagactttcagactgacagacagagggaataaatccacgatgcaggcaggttgtttacgtttctggtcatagcccaaagatagttttgtctggagatgatgatggagagttataatgaagtcaaaatctaa

SEQ ID NO: 95861 - DNA, 600 bp, Chicken  19866894618946_2
tttcaagaatggcaggaggcagactttcagactgacagacagagggaataaatccacgatgcaggcaggttgtttacgtttctggtcatagcccaaagatagttttgtctggagatgatgatggagagttataatgaagtcaaaatctaacaggcagaaaaataatagtaagcaatcagggaaaccagttaagattttgcaacctaaaagtaacagcagcagaaactatcagtgacagaactgcatttagaccgtgagccccagaaggcagagattttcccttgctacagacggagcaaytgcagcaagagcagctgccatttgcatttctcagtggtaccgcagtgtaagcaattaaagcacaatgtaaacaagctctaagaggggatgagtgtttttgctcattaagcccaaatcagaatgagagaaaataaaatggcttaaaggcacaattcactaaagaatcrtgggagtaaatgaaagccaagaggggagtctgtcctgtccaagggaaatgcaatgggagaggcagtgaaagagggagaggaaagcttcccatcaccccagcagagaatctgcaagatagtagagggctgctgg

SEQ ID NO: 95862 - DNA, 600 bp, Chicken  19866894618946_3
gtaagcaatcagggaaaccagttaagattttgcaacctaaaagtaacagcagcagaaactatcagtgacagaactgcatttagaccgtgagccccagaaggcagagattttcccttgctacagacggagcaaytgcagcaagagcagctgccatttgcatttctcagtggtaccgcagtgtaagcaattaaagcacaatgtaaacaagctctaagaggggatgagtgtttttgctcattaagcccaaatcagaatgagagaaaataaaatggcttaaaggcacaattcactaaagaatcrtgggagtaaatgaaagccaagaggggagtctgtcctgtccaagggaaatgcaatgggagaggcagtgaaagagggagaggaaagcttcccatcaccccagcagagaatctgcaagatagtagagggctgctgggggtggtggatagttctgctcttggggctgtcatgaggataacccttgtgagagacgcaaactgtttgtgtaacgtcataagaacaactggagaaatagtggggataaacacagtggtctgtataaagcaatggagactgcactggccatgaaggttgattttgcta

SEQ ID NO: 95863 - DNA, 600 bp, Chicken  19866894618966_1
tgggattcctctgcggtgaaggctgtcagactgaagaggagagagaagagggtatgttcaattctttcccttcagatagataccattgttagcatttactggcaccacctgtcatctcacagccacctgtgatgagtagctgcgagtcacaaaaccttgataggtgtgattctaatataactcagacttgctgtgtggacttggtgtgaaagttatttctgatgctatttttccacagggcacaatgagtggagtttcaggtatcttgttatgaacttgagtttgcaagagagtatttaraaattattagcagctaacagtgcagggaagcttcctgtaggaggttaatctttctgctctataccaagagaaaacttctctagattagtagtggtggagcatagagctggctgggagaactatttgaaagagctgtatgttgaggcctcctgatgctcttccactttctgatgcacagctggtaccatggagaacttaatgttgccgtgaggtgtgcagtcagttgttctgtttctgtagttgtactgaacttctccatcactaagttagtagcgttacctgccttttagactaaaatac

SEQ ID NO: 95864 - DNA, 600 bp, Chicken  19866894618978_1
tgtgtggatgtggcacggagggacgtggtcagtgggtgtggaagggatgggttggtagttggactggatgatcttagagaccttttccaaccttaatgactgtgattctgtgatctacagactatctttcctctggtctctgtacaaggtaacattgctgttgtgcgcttcacctataattgataggtaatataaaagttgtgaagttcatgtgaattgctgcatactttcagctcagatacccatttaaattatgtcctgttttgtttctcctcccctccagcaaatgtcacagtcagmagagcagagtttctgaaggctttgtttttctctgatagcacaaagcagcccaaacagtaccaatgggctgcagcttggaagcactgctagggaggaaaattaacgcagctgaataaacatgggccagctttggctgacaccccggggtgaaatctttaggtcagttaggctgaaaatgacagtaggaaatgggtcaggcatgcaagacccagcaccccatgtttcccaagctccaaagccagtctttgcagttcaagcaagcagagaatgcttctctgctgagccactggggtaactgat

SEQ ID NO: 95865 - DNA, 599 bp, Chicken  19866894618982_1
  misc_feature (1)..(15): n is any nucleotide
nnnnnnnnnnnnnnncgatataatttctaacttattgtgtaatttatagcagcatttatcctacatagaatgaggagaaattctccaaatgattttaaaaatgtcatcattttatcattacaatacacagggtgacatcctgaggtctctgtttttgacctctgaaataatggtattagttttgaataaaatgctccttgcacaggtggctggagttgggctgagagatctggatatgctatggccagaagaaaagaggataggtcaggggcaatcgcattgctgtcttcagctgtctgkggagggctgtagacaaggcagtgatctcaaaattgctcagagaaaggacataatgcagtggtcacaagatgcagaaaacaggttctcactgggtaataaaatggaaattcttcaccaggaggcaggtcagatgctggaacgggtttctccaaaatgctgtagcctctgtccacagagacactgaaaagttgcaagacggtgtgatctgtcttgaagctaaccctgcctgaagtacctggttgaagtgacggctcccagacaaagtccttctgctgttcttttgttcctgttgaagttgg

SEQ ID NO: 95866 - DNA, 600 bp, Chicken  19866894618986_1
tttagagactgcctaatgacactgtgatgaacactagccactcccagcattcagtctaatttatcatgcttggctcatttcctaggattaggtccagaatagcctctggccatgtaggctgttcaacaaactgtgtaagaaaagaaagagagcatggtccatggacacatagttcccccctctttcagatagttgttatcccattctggatctaagcattttaaattctttatgattaaagacctggcattcttgcagagctgtttaattcactgaggaaatatagatatacataaatawacatatacacacatatatatagctctcccttaactttgtgttagccatttagcaaaggtttctagcgttgtttatttccattctattcaactgatatcttcagtttgtgaaagaataaggtttttctcccctgaagattttgttgtattacatataaaaagctgcttgtatgtgtgcatgtgcatatacgtacaaggggtgagtttatctaaagatatataaaagctgagattattttgtggactgttatttatagtgatttggatagcccaaagtttgttgtgtactttgttgcagtat

SEQ ID NO: 95867 - DNA, 600 bp, Chicken  19866894619001_1
agaatgtatctgctcccaaaattccaagcaatatttttggcaggattttgggaaatactttagccaaaaaaggaatgatagatctgagagagaaagaaggttcatggccctatcaatttgtggtcagcatattttacactctcattaaaatgtattgtctacaaaaaccttcagtaaattaatgattagaaagtacctcattgtgcttaatgccagacatccaaaaagaacggtgtgaattaagttgtaagcagcatcaggcttcagtgatatcgtgcattcttccattttttcgagggsttgatttgaacagctgattaagcacaacaagcaataagtgttaataaaagcatttaatcctcctgatgttaaagggcaatactgctattatgagtccacaatcttatattacacctgatgtaattaagccttctagcaccagcttgatacagcattaagtatttattttcacgtatgcttttctagaagtaattgtttctagactgcagttgtttacagaaactcatgcttgaacatcctagtctattgctgtcagttcctaagtctgcggaagaagacaaagctgatttaaaaaaaaaa

SEQ ID NO: 95868 - DNA, 600 bp, Chicken  19866894619006_1
ttctctgcttctatccagctacaacgggggaagaactgagttcacagatctctgtggttccagtttactttttgtatattctgtccttagagaagaaacacctggttaaaggtagaactccttcatgatgtaactcagatacagaatcacagagtacgtaaggtgggaaggcacttctgaagattattgtgttccactccactcacccccagcccaaatgacagtcagctgcagcagggtggtcaaggctgtatcaacaatgggttttgagtatctccacagatgcagactgtaacactyctctgttcagcctctttcagtatttagacatcctcaattaaacattttttttctgtttatatttaaaaagaataccctctttttcatttggtcctcttctaccttattctgccagtccataacaatgagacaggtctgactgtcttctttactgtttcccagcaggtatttatacacatgtatagggtccctctgagacatctccacatttaatgatcctagttcttgcttgtgaaagatgctccagtccccaaatcacttttgtgacagtgttctagacttgctctagtaagttcatgt

SEQ ID NO: 95869 - DNA, 600 bp, Chicken  19866894619021_1
tatttaatgtacaagcacagacaaaagaatactgggaatgtacatgtttaagtgttaataaaatgtgcatataactccaatgcattagggcagacaatactagaagtccatacctaaaggtgcctcttaacaactcaaacctgctcagggcccaggatcccttggagtgttttaatgaaatgaatcagcaccagtgagatcagtcatccctttagaggacgacccatagatgtagccatagagtcatcccatccaggtcctctgcattgcagctaattgataattagtgctgttgttttrtgtaagaaactcaaaatacctgtaaagcatagttcrattaaactgttcactaaattttccattgagaaaggatgataactatagatcagcctccgggaatgacaaaaggaagtgcacaacactggaaggtgaagttttgccacaatatttactcccattactcttgtttgaagatgataaaactgaacacctacaaacatctatgctttccattgtatagcgtccactgctgttggtttttatgtactcagggagatttttctcacagtctggtgtttgcatctattgactttgtaatct

SEQ ID NO: 95870 - DNA, 600 bp, Chicken  19866894619021_2
aatgtacatgtttaagtgttaataaaatgtgcatataactccaatgcattagggcagacaatactagaagtccatacctaaaggtgcctcttaacaactcaaacctgctcagggcccaggatcccttggagtgttttaatgaaatgaatcagcaccagtgagatcagtcatccctttagaggacgacccatagatgtagccatagagtcatcccatccaggtcctctgcattgcagctaattgataattagtgctgttgttttrtgtaagaaactcaaaatacctgtaaagcatagttcrattaaactgttcactaaattttccattgagaaaggatgataactatagatcagcctccgggaatgacaaaaggaagtgcacaacactggaaggtgaagttttgccacaatatttactcccattactcttgtttgaagatgataaaactgaacacctacaaacatctatgctttccattgtatagcgtccactgctgttggtttttatgtactcagggagatttttctcacagtctggtgtttgcatctattgactttgtaatctgtagacagactcttaatgagcagaaaagacaagaac

SEQ ID NO: 95871 - DNA, 599 bp, Chicken  19866894619029_1
  misc_feature (1)..(62): n is any nucleotide
nnnnnnnnnnnnnnnnnnnnnnnnnnnnnnnnnnnnnnnnnnnnnnnnnnnnnnnnnnnnnnagccctgtatggaggttgtgctgcatgtggctgcgtcctcaactggaagagaggcgttgcttgtaggagggccctacttcctgtaattataattacatataattgtgtaataattatgtatgtgtctacaactatgcattaattacatacatatataagtaaaactgcaataaattaagctacagctaagcttgaaagtagatcgcagctacataaaaagatctagacaagggggaayggctttaaactgaaaggtgggaggtttaggtcagatgttaggaagaaattctttacccagagggcggtgaggcgctgccagccaccccagggggtgctcaggaccgggctggatggggccggggcagccagcacacagcagagggtgcgaatggctgatccttaaggccccttccacccccatccattctatggttctgtgatctgcaaagtgctgcggtgaggaatgctcgcatggaataactggtgtccttctcccagctccaagaacacatggaggctttctctcatgaatagttt

SEQ ID NO: 95872 - DNA, 600 bp, Chicken  19866894619031_1
gtttcacctgaacaattactgtggtccaaaccataggatagcagactttctattaaagcatattcaaaagataggtctaatgtcttcctctgacaagtctagcagcaaagctagatgtggcagttaaaaaatatgtatccgtcttactaagatattcctagatattccagttgtaatctagcttcctggactgttatttgctagaataaaaaggtctttaattttacatttcttttgaccttttctggccaccacatgtatcacaaaactactttgaatgagccagagaaactgtcagcrtgcttctcgtgaatagtgttaacagcatattaagaactagcaattgcagtcttttacctgttagctcactgattttgttcctctgctttgactttgactttcttccactaaaaaacgttaataacttccagccactgggaaagttattggaaaaaaaaaaatccagtatcctctaatgattgctctgttgaaactgataacctctgagttcagttaggcaagtacatatgcataataaataaccagggaaactgaaaacaattttttttcacccaaagtgttctcacacatacatgcaaa

SEQ ID NO: 95873 - DNA, 599 bp, Chicken  19866894619032_1
  misc_feature (1)..(47): n is any nucleotide
nnnnnnnnnnnnnnnnnnnnnnnnnnnnnnnnnnnnnnnnnnnnnnntctgctgctctttccaggactgcttcaggcctctgggccttgatttctgccatcctctgttgcctgacagtctctgccctcttgcagagctccatcccatcccaccaagatgtcttgctacgacctgtgcccaccaaaaaccagcgtggccgtgccccagcccatcgctgagagctgcaacgagctgtgcgcgcgccagtgccccgactcaacggccttcatccagccaccgcccgtcgtcgtcaccttcccyggccccatcctcagctccttcccccagcaagccgtggtgggctcctccggagcacccgcctttgggggctccytgggrctggggggcctctacggcgccggggccactcagggctcggggggcctctgcacctttggcagacsctaygyktctcctgcctgcagcccctgccccttgccccgctacagcaggaagttctggaacacctgcgggccctgctaagcccaggcctggacttcctctcctccatcttccttatcctgtgcatgaacacatgatgtctacattgcccttcattg

SEQ ID NO: 95874 - DNA, 600 bp, Chicken  19866894619032_2
aggcctctgggccttgatttctgccatcctctgttgcctgacagtctctgccctcttgcagagctccatcccatcccaccaagatgtcttgctacgacctgtgcccaccaaaaaccagcgtggccgtgccccagcccatcgctgagagctgcaacgagctgtgcgcgcgccagtgccccgactcaacggccttcatccagccaccgcccgtcgtcgtcaccttcccyggccccatcctcagctccttcccccagcaagccgtggtgggctcctccggagcacccgcctttgggggctccytgggrctggggggcctctacggcgccggggccactcagggctcggggggcctctgcacctttggcagacsctaygyktctcctgcctgcagcccctgccccttgccccgctacagcaggaagttctggaacacctgcgggccctgctaagcccaggcctggacttcctctcctccatcttccttatcctgtgcatgaacacatgatgtctacattgcccttcattgttctttctgtgccttgtgctgactgcagtgttggagaagcctgaagaagcacttctcctgatgctccaggtttc

SEQ ID NO: 95875 - DNA, 600 bp, Chicken  19866894619032_3
tctgggccttgatttctgccatcctctgttgcctgacagtctctgccctcttgcagagctccatcccatcccaccaagatgtcttgctacgacctgtgcccaccaaaaaccagcgtggccgtgccccagcccatcgctgagagctgcaacgagctgtgcgcgcgccagtgccccgactcaacggccttcatccagccaccgcccgtcgtcgtcaccttcccyggccccatcctcagctccttcccccagcaagccgtggtgggctcctccggagcacccgcctttgggggctccytgggrctggggggcctctacggcgccggggccactcagggctcggggggcctctgcacctttggcagacsctaygyktctcctgcctgcagcccctgccccttgccccgctacagcaggaagttctggaacacctgcgggccctgctaagcccaggcctggacttcctctcctccatcttccttatcctgtgcatgaacacatgatgtctacattgcccttcattgttctttctgtgccttgtgctgactgcagtgttggagaagcctgaagaagcacttctcctgatgctccaggtttctcctg

SEQ ID NO: 95876 - DNA, 591 bp, Chicken  19866894619032_4
ccatcccaccaagatgtcttgctacgacctgtgcccaccaaaaaccagcgtggccgtgccccagcccatcgctgagagctgcaacgagctgtgcgcgcgccagtgccccgactcaacggccttcatccagccaccgcccgtcgtcgtcaccttcccyggccccatcctcagctccttcccccagcaagccgtggtgggctcctccggagcacccgcctttgggggctccytgggrctggggggcctctacggcgccggggccactcagggctcggggggcctctgcacctttggcagacsctaygyktctcctgcctgcagcccctgccccttgccccgctacagcaggaagttctggaacacctgcgggccctgctaagcccaggcctggacttcctctcctccatcttccttatcctgtgcatgaacacatgatgtctacattgcccttcattgttctttctgtgccttgtgctgactgcagtgttggagaagcctgaagaagcacttctcctgatgctccaggtttctcctgcctccctgggcctcgtacacatgtgtggtgttcattctttcctgccttcacaataa

SEQ ID NO: 95877 - DNA, 587 bp, Chicken  19866894619032_5
cccaccaagatgtcttgctacgacctgtgcccaccaaaaaccagcgtggccgtgccccagcccatcgctgagagctgcaacgagctgtgcgcgcgccagtgccccgactcaacggccttcatccagccaccgcccgtcgtcgtcaccttcccyggccccatcctcagctccttcccccagcaagccgtggtgggctcctccggagcacccgcctttgggggctccytgggrctggggggcctctacggcgccggggccactcagggctcggggggcctctgcacctttggcagacsctaygyktctcctgcctgcagcccctgccccttgccccgctacagcaggaagttctggaacacctgcgggccctgctaagcccaggcctggacttcctctcctccatcttccttatcctgtgcatgaacacatgatgtctacattgcccttcattgttctttctgtgccttgtgctgactgcagtgttggagaagcctgaagaagcacttctcctgatgctccaggtttctcctgcctccctgggcctcgtacacatgtgtggtgttcattctttcctgccttcacaataa

SEQ ID NO: 95878 - DNA, 585 bp, Chicken  19866894619032_6
caccaagatgtcttgctacgacctgtgcccaccaaaaaccagcgtggccgtgccccagcccatcgctgagagctgcaacgagctgtgcgcgcgccagtgccccgactcaacggccttcatccagccaccgcccgtcgtcgtcaccttcccyggccccatcctcagctccttcccccagcaagccgtggtgggctcctccggagcacccgcctttgggggctccytgggrctggggggcctctacggcgccggggccactcagggctcggggggcctctgcacctttggcagacsctaygyktctcctgcctgcagcccctgccccttgccccgctacagcaggaagttctggaacacctgcgggccctgctaagcccaggcctggacttcctctcctccatcttccttatcctgtgcatgaacacatgatgtctacattgcccttcattgttctttctgtgccttgtgctgactgcagtgttggagaagcctgaagaagcacttctcctgatgctccaggtttctcctgcctccctgggcctcgtacacatgtgtggtgttcattctttcctgccttcacaataa

SEQ ID NO: 95879 - DNA, 584 bp, Chicken  19866894619032_7
accaagatgtcttgctacgacctgtgcccaccaaaaaccagcgtggccgtgccccagcccatcgctgagagctgcaacgagctgtgcgcgcgccagtgccccgactcaacggccttcatccagccaccgcccgtcgtcgtcaccttcccyggccccatcctcagctccttcccccagcaagccgtggtgggctcctccggagcacccgcctttgggggctccytgggrctggggggcctctacggcgccggggccactcagggctcggggggcctctgcacctttggcagacsctaygyktctcctgcctgcagcccctgccccttgccccgctacagcaggaagttctggaacacctgcgggccctgctaagcccaggcctggacttcctctcctccatcttccttatcctgtgcatgaacacatgatgtctacattgcccttcattgttctttctgtgccttgtgctgactgcagtgttggagaagcctgaagaagcacttctcctgatgctccaggtttctcctgcctccctgggcctcgtacacatgtgtggtgttcattctttcctgccttcacaataa

SEQ ID NO: 95880 - DNA, 599 bp, Chicken  19866894619043_1
  misc_feature (1)..(19): n is any nucleotide
nnnnnnnnnnnnnnnnnnnccatcaggaagcaggtggaattgcagtgacagcctccagctgccatttcacatggcagcactgttgcatggggaccagctagaatcccagaaatccagacattccccaagattccatccttcaccatacaggtttctctgggagaagctcagtatctccctcgtcagctcctaaagctgccatagggaatgggatggggatactggtcaggtttggtggtacgggttctcaagctgtccctaagaggtgttgtagggaacgggatgggcactctgccttckaaattcttctaactgttcaatttcccatcttccaggatcttgttgagctctacctgaccaactgcgagaagctgacagccaagagtcttcaaactttggtgagcttcagccacacgcttatctcccttagcctctttggatgctgcaatatcttctatgaggaagagaaccccggaggctgtgaagatgactgtttggtgaaccccactcgccaggtgttggtcaaggacttcacttttgaaggctttagccgcttgcgcttcctcaayctgggccgcttgattgaaggggtcaacgta

SEQ ID NO: 95881 - DNA, 600 bp, Chicken  19866894619043_2
tgtagggaacgggatgggcactctgccttckaaattcttctaactgttcaatttcccatcttccaggatcttgttgagctctacctgaccaactgcgagaagctgacagccaagagtcttcaaactttggtgagcttcagccacacgcttatctcccttagcctctttggatgctgcaatatcttctatgaggaagagaaccccggaggctgtgaagatgactgtttggtgaaccccactcgccaggtgttggtcaaggacttcacttttgaaggctttagccgcttgcgcttcctcaayctgggccgcttgattgaaggggtcaacgtagagacattgcttcggcctttgacctcccttgctgctcttgatctctctgggatccagctgaacgatgtgggatttctgacacagtggaaggacagtctggtttccttagtgctttacaacatggacctttcagaggagcacatccaagtgattgcacagcttcacaagctcaggtcagcagatctcttcttccttatttatctttttcccactgataggaaccgtgcaagtctgttaggaatgggatacgtgccttttcatggaaagcca

SEQ ID NO: 95882 - DNA, 599 bp, Chicken  19866894619044_1
  misc_feature (1)..(113): n is any nucleotide
nnnnnnnnnnnnnnnnnnnnnnnnnnnnnnnnnnnnnnnnnnnnnnnnnnnnnnnnnnnnnnnnnnnnnnnnnnnnnnnnnnnnnnnnnnnnnnnnnnnnnnnnnnnnnnnnntaggtataattccacatgaggaaaattgtcaccatctcctgctaataatgctcagaattgaaggtctcttagaccttaatgggctaaagttaccatttaagtgctccatgtagctcctgttcattggaagaggattttgaattttatttcttatagttgtactcacagccaggtcagaacttataartgtcataataaggaaatttcctgataaatttcccctgacatcagaggaaataaatagcttagttgttcacttctaaaaaaaaatgggaaggttagtttgttctagtgtcttttatactaatagaattagctacctgataatttatatatgtgcaaagactatgtaaatgaaggaaaagaggagaaaaatctcaatgtgaatttcatttgaagaccataatgatagttgtgtaagtttacaggcttgattccataatcacatatatggaaatgaagtccttgatgtaaaaacagtgttaa

SEQ ID NO: 95883 - DNA, 536 bp, Chicken  19866894619047_1
aggtcttggaggaagctgacatttgacaaatctgtatgagaagaaagaattaagttaaaaaaaaaaagacaacataaaagtaactcgagattatttgtgatagttctgtgctatttaggtgaattttaagatacagtaatagatcggggaaagaaagctcatgaactgtgatgacttgggcctggcagagctggacaattccactggctttcacgtcatcacaggattcagatcaaaaccgactttgttgtttttaagacccttcacgggcttactcttgccaatctgcgatctgtgacmctagtgttcaacaagcactggcttactttccagcttttcacacattctcacttccaacagtgcaaaaaactctctattccaccactctctagcacttgttttgtgattcaccaatgcatcaattccacccacgcaaacagaattcaacagaaacaaagaaaaactacaacaatctcttttctccaccttgttttcctcttgattacttcctccttttacagttgtttcctatttgc

SEQ ID NO: 95884 - DNA, 599 bp, Chicken  19866894619064_1
  misc_feature (1)..(166): n is any nucleotide
nnnnnnnnnnnnnnnnnnnnnnnnnnnnnnnnnnnnnnnnnnnnnnnnnnnnnnnnnnnnnnnnnnnnnnnnnnnnnnnnnnnnnnnnnnnnnnnnnnnnnnnnnnnnnnnnnnnnnnnnnnnnnnnnnnnnnnnnnnnnnnnnnnnnnnnnnnnnnnnnnnnnnntgtctttaactgccctcttgttctgagttactctagtgaagtagttttatgtttttgaacctctactcctactgcctgagtggaccttgagtgacacatgcctgatcctacaccacttgaagtttcccaacctyatgtcttttggtttaggaaactgtgcagacagcagccctcttctcagaaaggaaaatatgagagctgaaggcacagcaattagagctgcttcttgctgggctgtccctgttccctatcaggtcttagtgaaataaattgttgtgagagacrtatctgtagtaccaacagtaaggggtgttgcatcaatctacatttgtctgagtccacagggagtgcattttcttcacaggacaggcagctgaggtctttccccttgtgctctcacccatgcagcatccaagtgtttcactgcctcaag

SEQ ID NO: 95885 - DNA, 599 bp, Chicken  19866894619064_2
  misc_feature (1)..(15): n is any nucleotide
nnnnnnnnnnnnnnntgtctttaactgccctcttgttctgagttactctagtgaagtagttttatgtttttgaacctctactcctactgcctgagtggaccttgagtgacacatgcctgatcctacaccacttgaagtttcccaacctyatgtcttttggtttaggaaactgtgcagacagcagccctcttctcagaaaggaaaatatgagagctgaaggcacagcaattagagctgcttcttgctgggctgtccctgttccctatcaggtcttagtgaaataaattgttgtgagagacrtatctgtagtaccaacagtaaggggtgttgcatcaatctacatttgtctgagtccacagggagtgcattttcttcacaggacaggcagctgaggtctttccccttgtgctctcacccatgcagcatccaagtgtttcactgcctcaagcacgaggggacaggtggacgcacactgctggtggatggcttctatgcggcggagcaggttctccggcaagcccccgatcagtttgagctgctaagtaaggtgccactgaagcatgagtacatagagaatgtgggagattgtcacaaccaca

SEQ ID NO: 95886 - DNA, 600 bp, Chicken  19866894619069_1
acaatgcaccattgatttcactaagccctcttggacctgtttaagcagtggggctgcatgcagactgtgacattgtgtgcaaactgcccccagacttggcaaaccaaacatgcttacctggttatactaattattctactttacattattcaaagatcttttattaacgggatggaaagaagcccgctatgtcattctatatttcattccattcctttttaattcagtctctccattagggcccaatctgatctcatctcttacttttttgtttgtttgttggaggtggtttccttccamtagggaaaattgaggaggcacacttggttatggcacaaacggcccagctcactcttaacaagacaaatattacaccaagttaatttgaaggtagtatacataatgcagcatatcaattttgtatgacttacgggatcgtgcctgcaaaatagcaacttaaaatcaccattgtgttgccagtgacaattactgtactgtaagctgtttcaatgggggcacacacattaatttaattcattgcagcargcaggtaggcacgcacagagaaaaagcaccgcgaaataacgaatgctttacaat

SEQ ID NO: 95887 - DNA, 600 bp, Chicken  19866894619069_2
tctgatctcatctcttacttttttgtttgtttgttggaggtggtttccttccamtagggaaaattgaggaggcacacttggttatggcacaaacggcccagctcactcttaacaagacaaatattacaccaagttaatttgaaggtagtatacataatgcagcatatcaattttgtatgacttacgggatcgtgcctgcaaaatagcaacttaaaatcaccattgtgttgccagtgacaattactgtactgtaagctgtttcaatgggggcacacacattaatttaattcattgcagcargcaggtaggcacgcacagagaaaaagcaccgcgaaataacgaatgctttacaatttacaacataaatagttccttcaagactacaaacccctgtcatgtcagaagcaccttctggcactgctccaattcattaagccagcagcgctgcaacaacaacaacaamaaaaaaaagtgcctgcaaacatacattacaatcattgttagctccattctgctctgtcactcatatgggtgtgatagagggaaagcatctaggagttctcatctaaaactcatgaagactacaatcaagtaccaacc

SEQ ID NO: 95888 - DNA, 462 bp, Chicken  19866894619069_3
atatcaattttgtatgacttacgggatcgtgcctgcaaaatagcaacttaaaatcaccattgtgttgccagtgacaattactgtactgtaagctgtttcaatgggggcacacacattaatttaattcattgcagcargcaggtaggcacgcacagagaaaaagcaccgcgaaataacgaatgctttacaatttacaacataaatagttccttcaagactacaaacccctgtcatgtcagaagcaccttctggcactgctccaattcattaagccagcagcgctgcaacaacaacaacaamaaaaaaaagtgcctgcaaacatacattacaatcattgttagctccattctgctctgtcactcatatgggtgtgatagagggaaagcatctaggagttctcatctaaaactcatgaagactacaatcaagtaccaaccccaggagcacttccctcctctctta

SEQ ID NO: 95889 - DNA, 585 bp, Chicken  19866894619076_1
gtgtttgaaccatgtagcaatttataacaactgaacatctgccttaatgctggaaacaagtcttttgttaggaagcaaattgagaatccttctatattgagtatgtgtgtctgcatttttctgttgtgctcatgcacgcatgattggaagaatatttctttgtgcattcaaaaggtgataccaggcaacaatttcaggagtaggaatttgtctgccatggggacatcttgataatcaaacatcattggcaggagcagagttggtgtctgcttttaaggttccaacagctgaaggccatgraatggctttgtcctttctgcttgcattgcctgtggcagaactgagaaaggcagaattagaaacagctgctgcatgaggatgagtgtgtgcaggcagcccagcacagcccagccagagtgcccattcctcctctccaacatcagcaaaaccagcaaaccttggactttcaccgtctttccatgctggttctcctctttccaatagtcaaagccttggcttttccataccctgaagtggcaaaattcaattctacaaacgcatctgaaaagctttctctgtacagta

SEQ ID NO: 95890 - DNA, 600 bp, Chicken  19866894619079_1
gcccaggtattaccagctacatttgctaactgcatccagtttctgtaggaccatgtaactttgtgctatctttcagcttccagcaagggaaaaagaagaaaatgtggaagaccagatgtgcaaacttcacctcagtgtgaaagaaccagagcctgtccttttaattccagttcaacccatgcatgatgagtcagattctgtgcatatgcaagtcatctgtagaacatatgtaccatgaaaccaccacatccagcctgcattaaccttccctttctaatgcagcagagctgggatttgacytgggatttgacattctgaagctgttctggtggaaagtcctaactaaatggtcaaaatttccctttcccctctggatgaaacctcagagcatcagaagacagcatcttcatggaaagtggagctgtcatagtgttacagaattgtcttggttgtcagggatcaagtggtggaataaacaacatagaggattgcttcttctccaactgtaaagcttctacgtgggatgaaggttgtatgtcttctaacacaccctggtggcttgcaagttggtgtcctttcaggatatgtctgattacccat

SEQ ID NO: 95891 - DNA, 600 bp, Chicken  19866894619085_1
ttttaaagtggggtgacttgacaactttgatttcctcaggttagcgtcaccacatatattctgttcatgttactcatatatttatatttcaagactagaaacctcagtcacggagcaggacccagtttcttgctgtggtaccatgcaaactgagaagaaattatcctggccttccaaaaggtttctatcttttccctggatacacacagctatcagaatgggcatttgtattaataatgtgcatgcttgagggtggaatgttgagggcctggcttcagaagttcatacagcatagcaagygtatctgatctgaatctttctttaaaactgttaggaattttatatgaaacaaatcatgttggaagttttccagcatttctgattgtaatccaagtagcacaggagtagtctttgttcattttaactattactgcagaattggtgagaactgtaaatggaacagggccagtaaaaccatgccagttctgtgatctgaagtgataggtagctccttctatattttgtcacaatgtcccccaagcacatgacttatatgattaatttacattggaattgacatttaccgaacagtaatgatcc

SEQ ID NO: 95892 - DNA, 600 bp, Chicken  19866894619089_1
ttcaatcacacttgagtgaatttgaatatcagcttcagtacaattcttaatttacatatctacctgtgagcagattcagaccctttgctttgtcttcctgttcgttttggatatctttgtttctcttgatactaccttgtaaagttcagctattaattgatgaacttaaacttgtatgtagtagatagcataaaagaatataaattgcgtaggagaaagtaaagttttgacaccataaaacaaactttgaaatttacagtcattacagcacgacattttattaaataaaaaatatctgcktttatatccatcagtgcagggcttttctgtcaagctactacagagatcataatgtggaactgtcaaaactcctacacaaactgggacaacctctgccatcgtggctgagacaggaactacagaaagtaagatagcattgaaagaagatatttttgaaatctcttccacacttctgtcatcctacccaaagtcttcagtagttaccagaaagtcttgtaaaatatacctctgcaaaaaatagtaaaagacagaaattatttccatatgctggcatgtggattgtgaaaatacacgtgtttc

SEQ ID NO: 95893 - DNA, 600 bp, Chicken  19866894619089_2
ctaatcatgaaaaaatacacatatccagccttacatttgtgatacatttcagtgacacacctcataatacatcagtttaaatgtgagataaagtctaatcaaccatacttaaaagttgaaaaagatcattgaaaatttcagctgagtatggccttaaggtttctccgctgaactttggctctgaatgtttctgagggcataaaaaggtagggaatacaaaagattgctgcagtattaaatgaaatgctttttacggtaggtctgtattattatcataatttgttttaggatgaatagttwaaaatatgcatcaaatggtggaaaaactttatatgtctcagtgctgttttacaacctttatgtaatcatatcatttaacttycaaggtaatggaatagaaaccagtctgttataccctaaatagaaaacaggtgttgagatccttactgtacctctagctggtaatctttaatatttactgattttgtctctgtagtacctggttttgataggcttgtaaagaaaaaatccagacaaatttgctgtatataacaatattctttacacagcacatttttgctaagggaatatgcatgatta

SEQ ID NO: 95894 - DNA, 600 bp, Chicken  19866894619089_3
gtgagataaagtctaatcaaccatacttaaaagttgaaaaagatcattgaaaatttcagctgagtatggccttaaggtttctccgctgaactttggctctgaatgtttctgagggcataaaaaggtagggaatacaaaagattgctgcagtattaaatgaaatgctttttacggtaggtctgtattattatcataatttgttttaggatgaatagttwaaaatatgcatcaaatggtggaaaaactttatatgtctcagtgctgttttacaacctttatgtaatcatatcatttaacttycaaggtaatggaatagaaaccagtctgttataccctaaatagaaaacaggtgttgagatccttactgtacctctagctggtaatctttaatatttactgattttgtctctgtagtacctggttttgataggcttgtaaagaaaaaatccagacaaatttgctgtatataacaatattctttacacagcacatttttgctaagggaatatgcatgattaatgatgaggacctgctagagtagacacttttaagatgaacatctttattatttataagagaataaaaattttcatttcattt

SEQ ID NO: 95895 - DNA, 382 bp, Chicken  19866894619089_4
gttttgataggcttgtaaagaaaaaatccagacaaatttgctgtatataacaatattctttacacagcacatttttgctaagggaatatgcatgattaatgatgaggacctgctagagtagacacttttaagatgaacatctttattatttataagagaataaaaattttcatttcattttagatattcactgtaatataggtttgacccaaaatctgacttgttttaaaatagtcttatttgataaaagaaatgctttgcattctgaatatctgtaagtgcaaatcctctgcatgctayggacaacttgtgtcctacaagcatctatatggatttgttacaagtaaattgaataacggaaaaaatacctgcggttttcatc

SEQ ID NO: 95896 - DNA, 600 bp, Chicken  19866894619094_1
gcttaaaggatctgcatccagagggggaaaggcataaagcaacactcccagagaaatcactatttaggagggcatttgctgctcctcaaagtaaacagtactctgaagataaagctaaggctgcatgggcaattttacagttagaacttcttggctttgctcatacaactctgatgttcttctaaaggtgatctaccactaaaactactctaattacatcgttttcctccttccagaggctatttaagagaaagaaaaccattcagttttgtcttatctaggtgtctttttaacatcccrttgctggtcactccaratacccgtccagaagttcagaggacacctggactcctctccactcacacgataagctgcaaaattcgttatgcccacaaaacagcaaatgagtaaagagcctctcttgtgagagagctgtgcctcggccttaactgtgggcacggacaccctgcgaccttcctcagccacagacggagctcacagcgagatgcctacgtgacaagcagtgctctggcagaaatcagtttccaaacgcatgggggcaattaagatcagcgatacagatttatataaacgatgaaa

SEQ ID NO: 95897 - DNA, 600 bp, Chicken  19866894619094_2
tccagagggggaaaggcataaagcaacactcccagagaaatcactatttaggagggcatttgctgctcctcaaagtaaacagtactctgaagataaagctaaggctgcatgggcaattttacagttagaacttcttggctttgctcatacaactctgatgttcttctaaaggtgatctaccactaaaactactctaattacatcgttttcctccttccagaggctatttaagagaaagaaaaccattcagttttgtcttatctaggtgtctttttaacatcccrttgctggtcactccaratacccgtccagaagttcagaggacacctggactcctctccactcacacgataagctgcaaaattcgttatgcccacaaaacagcaaatgagtaaagagcctctcttgtgagagagctgtgcctcggccttaactgtgggcacggacaccctgcgaccttcctcagccacagacggagctcacagcgagatgcctacgtgacaagcagtgctctggcagaaatcagtttccaaacgcatgggggcaattaagatcagcgatacagatttatataaacgatgaaaaagccgtgggttgcct

SEQ ID NO: 95898 - DNA, 600 bp, Chicken  19866894619096_1
acatgtgaataatttttccaggatgtagcatttgcaggatctcgcctttatgtagatgcatgagagcatgcagggctgccaaacccttggcagcactatgggctggccttctatttgccacttagcaaaggtgagccagcatgggataaaagcccaactctgcgtgttgcatgaggcacttgcacagctgtgctctctgaagccttctttagaggatcatgccctgccctctgcttgggaaagtttccttacagcagcattccacatattgttaacactttacagattaataggtagtgytatcgaatggccagtttcagcctctaactcataggctatagcaagaagagtgcattctatttcaaaggatgttttcttttaaggaaaaatgatttttttttcttctgaatttaggaggtgggagttaggcagcacttaatgtattgaatgcagtaagagaaaatttgagcataaggtacagagacatgtaggttgagcttagatgaacacatttgtctgtggaaaattatatactgcctcaaccaaaaggaatttttccttctgaaattaaatgttttctccgatgcgttgggagatgtg

SEQ ID NO: 95899 - DNA, 599 bp, Chicken  19866894619099_1
  misc_feature (1)..(48): n is any nucleotide
nnnnnnnnnnnnnnnnnnnnnnnnnnnnnnnnnnnnnnnnnnnnnnnnatggtaatgacaagacagatgttggagtgctgtttgctcttcacttgatccatgaagcaagcagttcagcactgagctaaaggtgttgttgttctcccacacttctgaagattcaggatccacaacattttttatcagcagtttagtatcaacacagagcactcatcacattggtcagtgtggttagtgctggtaatgtgcagctaaggcaggaggctttgcagtccaaagcacagtttgtgaagtatataratgtgaggggaaaaaaatctcagaagatatcatttgtgtaattacatacaaaaaaatttaagtcacttacacagtgcacacaaatagtttgcagtctgtcttgaaccctagatgcttcactgtgatttctaaatagaatatgacttatgttcaaaataatccaatagatgaattctgccttttggattgttgtaccaggtcaaaggccattattgcagtaattgaataatcccacagacctttgctccagacattcactatggaaactaagcaatgaggacaggctattctattttcca

SEQ ID NO: 95900 - DNA, 600 bp, Chicken  19866894619105_1
tgtgactgtgagctgatgctctgtcgcactcaatgccagcccagctcacctccagtgagatgaactgttttgtcaacagctccatctgcagcccatgggcagctgagtgctgtgtgctgccatcctgggattgctgaacacagttgtctgttaaaattagttttgaaaggcaacaccttaaaacacctttttgcggtcaaaattttggcactgtcaagttttatatgatttctgagagtatagccgtaggctctgtcaatggtaactcactgtgaaagaagcagggaggaagagaaaggraaaacgagctatcacagttgctgaaagactgcaatcaggcataataaagtctccagtcagctgcttaaataaatacatggaaaattcaaggaagatggctttttctttaattaactttttctttttgtttgtttatttgttttttctttctctccaagaaattatttcagtgaatatgcctttatttgcaaaaacctaagctactggacgtttagtaccattttccttgtgatctgagagtgagagcagagtaactccttctgacagagctgtgatttttgttgtttgaataacttgtat

SEQ ID NO: 95901 - DNA, 600 bp, Chicken  19866894619109_1
atttctcctgagtctgtctcctttcactgtgcttcttctagtattatacctgacagtaaagaactgggatcatttagtacacctggcacctagtggtttcatggggctggaaaatcctgccagtaacgccatgagaaaaggctgctgccttctactgtgttgcttgtgagtatctaggtcatcacatccatgcagcaaatcttagtgggattgtttctaggcatggagtaaagcgtgattagtgtactcttggagatcgcagtatgtgcttggtacatctgtttaacttgcccagtggartctgggctcagattctgccttggggaaattctttgacatcactgccagctggatgcatcacatttatcttaccctcaacctcaggaaaataagagcttcttgctgggccagtggtactgtggttatgagcagggcctcttctcctttgtgtcatccttgaagggtatcaaccatgtcttgacttctgacctttccatttgtgtagcaagctgtgtactttatgcagtaaaaaaaagtgagctgttttttgtttcacggggggtgactgtgcatgcttaccctggcttaactgatgctgac

SEQ ID NO: 95902 - DNA, 599 bp, Chicken  19866894619114_1
  misc_feature (1)..(236): n is any nucleotide
nnnnnnnnnnnnnnnnnnnnnnnnnnnnnnnnnnnnnnnnnnnnnnnnnnnnnnnnnnnnnnnnnnnnnnnnnnnnnnnnnnnnnnnnnnnnnnnnnnnnnnnnnnnnnnnnnnnnnnnnnnnnnnnnnnnnnnnnnnnnnnnnnnnnnnnnnnnnnnnnnnnnnnnnnnnnnnnnnnnnnnnnnnnnnnnnnnnnnnnnnnnnnnnnnnnnnnnnnnnnnnnnnnnnnnnnnnnngtttctctgcacctacctcgtcctcagtcactgcttgatcgaagttctctacttccttcttgcrgtgtgcactgcttgtttaggaatgcagtcttacatttgtcatctgagtctatagaagccatttagacatgatttttgtgaacaggtaaagtagaagcaaaacttctttggatggtgaaatgtgtttaatgccagaagcaaggaaaaaaaatctataacttgtttttacactttgttttctttctttcttcatctgtctttctttctctttctttctttcttcctttctttctttcttcctttttattttttttccttttyttttcttccttacctttcagtaccctagcttttaacaat

SEQ ID NO: 95903 - DNA, 600 bp, Chicken  19866894619114_2
tcctcagtcactgcttgatcgaagttctctacttccttcttgcrgtgtgcactgcttgtttaggaatgcagtcttacatttgtcatctgagtctatagaagccatttagacatgatttttgtgaacaggtaaagtagaagcaaaacttctttggatggtgaaatgtgtttaatgccagaagcaaggaaaaaaaatctataacttgtttttacactttgttttctttctttcttcatctgtctttctttctctttctttctttcttcctttctttctttcttcctttttattttttttccrtttyttttcttccttacctttcagtaccctagcttttaacaatcaagattttttactgcagttattactgcagaagataaaatcaatgtgtactatttacatcttctcaggcataacaatgaactgcctgctgatcccttgtgattcaaaccacctataaaatatgttttattaaaaatactttacatttatatagaagaagacagtcaagtggttacggcagtacaagatggctgctttgtttttcttctgaaaaaatatacaagcaacagtaaaactaaaccctttaatatatgaaat

SEQ ID NO: 95904 - DNA, 600 bp, Chicken  19866894619114_3
cagtcactgcttgatcgaagttctctacttccttcttgcrgtgtgcactgcttgtttaggaatgcagtcttacatttgtcatctgagtctatagaagccatttagacatgatttttgtgaacaggtaaagtagaagcaaaacttctttggatggtgaaatgtgtttaatgccagaagcaaggaaaaaaaatctataacttgtttttacactttgttttctttctttcttcatctgtctttctttctctttctttctttcttcctttctttctttcttcctttttattttttttccttttyttttcttccttacctttcagtaccctagcttttaacaatcaagattttttactgcagttattactgcagaagataaaatcaatgtgtactatttacatcttctcaggcataacaatgaactgcctgctgatcccttgtgattcaaaccacctataaaatatgttttattaaaaatactttacatttatatagaagaagacagtcaagtggttacggcagtacaagatggctgctttgtttttcttctgaaaaaatatacaagcaacagtaaaactaaaccctttaatatatgaaatctat

SEQ ID NO: 95905 - DNA, 600 bp, Chicken  19866894619114_4
atgttttattaaaaatactttacatttatatagaagaagacagtcaagtggttacggcagtacaagatggctgctttgtttttcttctgaaaaaatatacaagcaacagtaaaactaaaccctttaatatatgaaatctatcatcaacagcagatttaatggtgaaaagatggattttttaacagataaacatattgacaagcaattcgaaaacagataacacacctttgggcacagtataagtaaatactgacaagagaactgcttcattcaaattcagttcaaataataagagacaartagaaattgttattctgtgtttttctccagccagtaagcttttcaaattaactttgttcagttatacattcagaagcatgtgtacttatttaaagactatcttgtactgagggaaattggaaatatatgcagctagattgtttttaaattgtctttctattcctcaaatattttctactgtatatatatgtatatatataggattagtggaactggacctattaaaaatactacttcagtacccaactatgtgagaaatactcaatggaatctctacctcagttagaaacgatttgttcc

SEQ ID NO: 95906 - DNA, 579 bp, Chicken  19866894619121_1
gtcaaaaagtccatccaatattatatccagtattgcacacagacagtttcccttccttatttttgtccaatttttacatcagtaagtcatgtcttccagcatcacttcagatcttatttcttttcttgcatctccaattccagaagccatctgctctttgttttggcctgacaagtcggtttttgcatgcagaccaacctggctggagattttcagcctgactctagctatttgagcataaaagagacaagcctcatatattcttacagttccctctctgctcatataaaatataaactrcagacatgacagattaatgttaccctgttatgtcaattggggatgtaaaaagttcctgctgctgtactcatgacttgtatatttgtccctttctccaacacagcagctctgtttaccatttggatattctgcccagcaaagcatttagtttgctatgccactgtggtccttagttacaaccataataatcacattttttttaattaaataacctgaaaggactttcaggatggggacaggagatgatctttgaagggtttagaaatcactgcagataag

SEQ ID NO: 95907 - DNA, 428 bp, Chicken  19866894619123_1
aacagactgatgcagattttattgtagcttaatgataggaaagccaaatccagagttgtaaggacccaggtatgatgatgagcttgagaccaagtgatagacaaggcaaagcgtcaagcctgggaaataagataaggacagtcaatgtgacttacctgaaaccaccactgaaaaggaacaagtgcaaagatatccctgacatcagaaagaaggtttacagagtaacaattttagactgtgggtggagagaaggggattaaaattgaaacacgaaacaggagaaagacttaagaaatcgcsaggccttgtgtcttaaaataccattcttcctattttaatttgcttccctcgtccttgcatttagacctggaagtcaacgtgggatgtgctcttcagagagactaaaacacctctgggtaacaaaagtt

SEQ ID NO: 95908 - DNA, 600 bp, Chicken  19866894619160_1
aaaatggtaaaaggggtgaccctgggaactaccagcttgtcagtctcacctttgtgctggtgaagatcatagaagagatccttctggaacatatactaaagcacatggaaggcagggaggtaatacaggagaaccagcatggcttcaccaaagacaaatcctgtctgtccaactagtggccttctctgatggtgtcactgcatcagtggacaagggaagagctactgatgtcattcatcatgacttcagtaatgcctctgacacagcacaccacaacttcctcttctccaaattggaaakatatggatttgatgggtagactgttaagtggacaaagaactggttgtaggatcaagttcagagtgtgtggtggtcaatggttccatgtatggatggcgatcagtgatgaatggtgtcccccagggatcagtgctgggaccattactctttaatatcttcatcagtgatatggacagtggggtcaagcgtaccttcagcaagtttgctgatggcaccaagctgtggggtgcagtcaacacaccagagggacaggatgctatttagaggggcttagacaggcttgagcagtgggtccagata

SEQ ID NO: 95909 - DNA, 600 bp, Chicken  19866894619164_1
ctggtgatattcttgtattcctgttttgcgtctgtagtacttccaattataccttactttccatgtccgatcttgctggtctgatgatcccttgtagatattctgctgtcatcttaagcccagtttagctaaagtacgaatttttgtttgctcttgtactcttactggtgactggaaacttcactatttgctttattctgcatttgtacttttgatggaaggagagaagtagcatttcctccagaggagggtgacagggtaaaatttagtccagctgaaactaagaaggggaaaataaaygagaagtcatagaargtaataatggtttcatcttgaataagttgtaaagtatactgcaaataatatttgtaatggtcatttgttgacagctatccacgctttttctgttgggttttgatgattctttaaaacattacaaatctctgttttcttttgccaaattctggtcatcttgcactcatacaaagcctccaaatgtagtatcttactattcagcattgctgactttaaaacatgcatttttttctttatccacacttttcttttgctcctctaagtcacttccatggactccctgaa

SEQ ID NO: 95910 - DNA, 600 bp, Chicken  19866894619164_2
tattcctgttttgcgtctgtagtacttccaattataccttactttccatgtccgatcttgctggtctgatgatcccttgtagatattctgctgtcatcttaagcccagtttagctaaagtacgaatttttgtttgctcttgtactcttactggtgactggaaacttcactatttgctttattctgcatttgtacttttgatggaaggagagaagtagcatttcctccagaggagggtgacagggtaaaatttagtccagctgaaactaagaaggggaaaataaaygagaagtcatagaargtaataatggtttcatcttgaataagttgtaaagtatactgcaaataatatttgtaatggtcatttgttgacagctatccacgctttttctgttgggttttgatgattctttaaaacattacaaatctctgttttcttttgccaaattctggtcatcttgcactcatacaaagcctccaaatgtagtatcttactattcagcattgctgactttaaaacatgcatttttttctttatccacacttttcttttgctcctctaagtcacttccatggactccctgaacaagttcttaggatt

SEQ ID NO: 95911 - DNA, 600 bp, Chicken  19866894619165_1
tcagctctatattttttctgttgtaaaaaccaaagggaacaacgtgtacaaacagagaaagagtcagtagaaaatattcttcccttaagtagaattggcacctggatcttaaaatcttaatgattttcatctatttagctagctagctaaatataggtgcataatgcttacggtaatttcaaaatctgtttttctacatccttgaaaagttctttattctgcttaaaatattttaaaccactattttcacccattcaaatgaattatttttgtatcatataggcataaattatctttaawatgtaacagtgtttcccattaacagttatttttaaaaatgaataattgtaaaaaatctgtacagtactaagtaactcagtgtacaagaaccaaattactgaggcatgaagaacctctagagatcattattagggattatggactactttggcaagcaacaggccagcagcatacttgattgcttgtcaaaacggtctgtaatcccaattaaggccctctcttgagagcttgctgatacacatcagggttgtggccaaggttctgcagatgcttaaaatgctctctgttttatctgttgca

SEQ ID NO: 95912 - DNA, 600 bp, Chicken  19866894619193_1
ttctgaaggaactttaatagagaagtctcctgcttgtgcctatatcaagtaagatattaatgaaagaagctcagttacttgcctgttgaggactagagagcttgcctacaccattgagtatttatttataattagttttcataaatatacaacacagctattttagtgccaaagactgcctagcaattctgcattacttatatgtgaagcattcttgcctttttcgagtgtcacatactagaaatgaattcaataccaattcttactatgtatgatgagaaaagaaagaataacccaackkaaattccacgatggataacagaattagaattgtaagcaattacctccaagctgaagctccagttaagttgcattagcttaaatataaataagttagagagacatggtgtcttaagttttcatggatctgtattcagaaaccatgaattctgaaccattgcagtatttcacaatactttttagccatatttatttctgttacagataggaaattgagagctagaccatgtaacacgttcatcaagagagcatagctttaagtgaagcctgagaatcttgcaacagcgtgttaggctttat

SEQ ID NO: 95913 - DNA, 600 bp, Chicken  19866894619193_2
tctgaaggaactttaatagagaagtctcctgcttgtgcctatatcaagtaagatattaatgaaagaagctcagttacttgcctgttgaggactagagagcttgcctacaccattgagtatttatttataattagttttcataaatatacaacacagctattttagtgccaaagactgcctagcaattctgcattacttatatgtgaagcattcttgcctttttcgagtgtcacatactagaaatgaattcaataccaattcttactatgtatgatgagaaaagaaagaataacccaackkaaattccacgatggataacagaattagaattgtaagcaattacctccaagctgaagctccagttaagttgcattagcttaaatataaataagttagagagacatggtgtcttaagttttcatggatctgtattcagaaaccatgaattctgaaccattgcagtatttcacaatactttttagccatatttatttctgttacagataggaaattgagagctagaccatgtaacacgttcatcaagagagcatagctttaagtgaagcctgagaatcttgcaacagcgtgttaggctttatc

SEQ ID NO: 95914 - DNA, 600 bp, Chicken  19866894619201_1
tggtgctgcctggtgctggagctctgcggggacttcatggggtgactttcctccatatctccctggatgagatgaatgcaaacttgaagttggttttgtctgtctgtggtaggctgaatgcttctggcttctcatccagcactgacttttagtatgatccagtttttgcaattggagccaatgattttaacagtgctttatgtgtgtgtttggtgaaaaatggggtctgtttcacaggaaacttgtttgcacctgccacgatcatcttgtttgctcttcctttgcccctttcactggagytgcattagctgcaactgcagagtgttctttcaatccctggcatccacagtgtggaatgtgattgtggagctgagcagctggggaagggatgcagggtgcaaacctcagcgcccattcatgctgtgagccactctgcagggataaatggyggtctccttgtygagcccagagattaagcatcttcagrgagataagattgtagttggcttttttggggtgatccgtgcagtgtgtgtgtactgctgggctcgtgctgcagcagcagaatgtgaggaagcctgggcgaggggaggtgctagg

SEQ ID NO: 95915 - DNA, 600 bp, Chicken  19866894619201_2
tagtatgatccagtttttgcaattggagccaatgattttaacagtgctttatgtgtgtgtttggtgaaaaatggggtctgtttcacaggaaacttgtttgcacctgccacgatcatcttgtttgctcttcctttgcccctttcactggagytgcattagctgcaactgcagagtgttctttcaatccctggcatccacagtgtggaatgtgattgtggagctgagcagctggggaagggatgcagggtgcaaacctcagcgcccattcatgctgtgagccactctgcagggataaatggyggtctccttgtygagcccagagattaagcatcttcagrgagataagattgtagttggcttttttggggtgatccgtgcagtgtgtgtgtactgctgggctcgtgctgcagcagcagaatgtgaggaagcctgggcgaggggaggtgctaggacaggaggatttgcaaagctgctgtggcaagtactgtgctcagcctgctctctggtggtagctgctgtagcagggatgacctttgataaaaatgtgaagcatttggtttgattggggtggttgtggttgctcagctccatacagctcac

SEQ ID NO: 95916 - DNA, 600 bp, Chicken  19866894619201_3
gtttttgcaattggagccaatgattttaacagtgctttatgtgtgtgtttggtgaaaaatggggtctgtttcacaggaaacttgtttgcacctgccacgatcatcttgtttgctcttcctttgcccctttcactggagytgcattagctgcaactgcagagtgttctttcaatccctggcatccacagtgtggaatgtgattgtggagctgagcagctggggaagggatgcagggtgcaaacctcagcgcccattcatgctgtgagccactctgcagggataaatggyggtctccttgtygagcccagagattaagcatcttcagrgagataagattgtagttggcttttttggggtgatccgtgcagtgtgtgtgtactgctgggctcgtgctgcagcagcagaatgtgaggaagcctgggcgaggggaggtgctaggacaggaggatttgcaaagctgctgtggcaagtactgtgctcagcctgctctctggtggtagctgctgtagcagggatgacctttgataaaaatgtgaagcatttggtttgattggggtggttgtggttgctcagctccatacagctcacagcagagtcatc

SEQ ID NO: 95917 - DNA, 600 bp, Chicken  19866894619201_4
taacagtgctttatgtgtgtgtttggtgaaaaatggggtctgtttcacaggaaacttgtttgcacctgccacgatcatcttgtttgctcttcctttgcccctttcactggagytgcattagctgcaactgcagagtgttctttcaatccctggcatccacagtgtggaatgtgattgtggagctgagcagctggggaagggatgcagggtgcaaacctcagcgcccattcatgctgtgagccactctgcagggataaatggyggtctccttgtygagcccagagattaagcatcttcagrgagataagattgtagttggcttttttggggtgatccgtgcagtgtgtgtgtactgctgggctcgtgctgcagcagcagaatgtgaggaagcctgggcgaggggaggtgctaggacaggaggatttgcaaagctgctgtggcaagtactgtgctcagcctgctctctggtggtagctgctgtagcagggatgacctttgataaaaatgtgaagcatttggtttgattggggtggttgtggttgctcagctccatacagctcacagcagagtcatcaactcagctgcttttgcttttgttcc

SEQ ID NO: 95918 - DNA, 527 bp, Chicken  19866894619201_5
tggttgtggttgctcagctccatacagctcacagcagagtcatcaactcagctgcttttgcttttgttcccttactcctgagcaaaattcctaggtaaaaaattgaaatcacagcagcttcagaaagagaactgccagcaaagtttccctatgcagtttgtccagtgtttgacaaagagctccattcctcctttctttcaggtcaggagagtagacagcaggtaactgctggcccacagcatggaagaaataaacatcttgggaatctccagtcaagtttggctgaaaacagccaacacrttccaaaagctcttgccagaactgagatgcagagacacttaagtagggcactgacttgtggttggtctcatttctttggctggctgcaggggcagttcatgggatggatactttttgtttagatgacaaggcacaaactgtttggcttctttgtgcaaagctgttgtgaggaaggaagtgctccataagttgttcaaaggaggcaggccagttgtgcttgttaggag

SEQ ID NO: 95919 - DNA, 599 bp, Chicken  19866894619204_1
  misc_feature (1)..(46): n is any nucleotide
nnnnnnnnnnnnnnnnnnnnnnnnnnnnnnnnnnnnnnnnnnnnnntcttagattttaatctttcaccataaggactaaataattaaaaactttaaaaaatcatttcttcagagtcagaatttctacagcatatgtctggcagctacaggaaaacagagcagaaagaccagctgggtctactcttccagcagcagtaccaggtccttttctatagaccttttaacacagcacaaaacaaagtcatttacagcgaagtgataggattcccattgtttcccttttgtggctattcctcaatmacagaatcacagaacagctttagatgaaagggacattaaagatcatcaagctccaacccctgccatgggytggttaccccccaccagctcaggctgcccaggaccccatccagcctgatcttgagcacctccagggatagggcacmacagctctctgggcagctgtgccagggcctcaycaccctctcagtgaaaaatcttcccctaacatttaatctaaatgacccctcttttagtttaaaactgttctttcttgtcctatcactaatctacctrtgtgaaaagttggttcctgttta

SEQ ID NO: 95920 - DNA, 600 bp, Chicken  19866894619204_2
aaggactaaataattaaaaactttaaaaaatcatttcttcagagtcagaatttctacagcatatgtctggcagctacaggaaaacagagcagaaagaccagctgggtctactcttccagcagcagtaccaggtccttttctatagaccttttaacacagcacaaaacaaagtcatttacagcgaagtgataggattcccattgtttcccttttgtggctattcctcaatmacagaatcacagaacagctttagatgaaagggacattaaagatcatcaagctccaacccctgccatgggytggttaccccccaccagctcaggctgcccaggaccccatccagcctgatcttgagcacctccagggatagggcacmacagctctctgggcagctgtgccagggcctcaycaccctctcagtgaaaaatcttcccctaacatttaatctaaatgacccctcttttagtttaaaactgttctttcttgtcctatcactaatctacctrtgtgaaaagttggttcctgtttatcagctccttttaagtaatgtaaggctgcactgagatgtcctcagaggtttctcttctccaagccaaacaa

SEQ ID NO: 95921 - DNA, 600 bp, Chicken  19866894619204_3
caggaaaacagagcagaaagaccagctgggtctactcttccagcagcagtaccaggtccttttctatagaccttttaacacagcacaaaacaaagtcatttacagcgaagtgataggattcccattgtttcccttttgtggctattcctcaatmacagaatcacagaacagctttagatgaaagggacattaaagatcatcaagctccaacccctgccatgggytggttaccccccaccagctcaggctgcccaggaccccatccagcctgatcttgagcacctccagggatagggcacmacagctctctgggcagctgtgccagggcctcaycaccctctcagtgaaaaatcttcccctaacatttaatctaaatgacccctcttttagtttaaaactgttctttcttgtcctatcactaatctacctrtgtgaaaagttggttcctgtttatcagctccttttaagtaatgtaaggctgcactgagatgtcctcagaggtttctcttctccaagccaaacaagcccagctccttcaatctttcttcaaaagaaaggtgctccagcaaataaattatataaatataaacaaaaataatt

SEQ ID NO: 95922 - DNA, 600 bp, Chicken  19866894619204_4
actcttccagcagcagtaccaggtccttttctatagaccttttaacacagcacaaaacaaagtcatttacagcgaagtgataggattcccattgtttcccttttgtggctattcctcaatmacagaatcacagaacagctttagatgaaagggacattaaagatcatcaagctccaacccctgccatgggytggttaccccccaccagctcaggctgcccaggaccccatccagcctgatcttgagcacctccagggatagggcacmacagctctctgggcagctgtgccagggcctcaycaccctctcagtgaaaaatcttcccctaacatttaatctaaatgacccctcttttagtttaaaactgttctttcttgtcctatcactaatctacctrtgtgaaaagttggttcctgtttatcagctccttttaagtaatgtaaggctgcactgagatgtcctcagaggtttctcttctccaagccaaacaagcccagctccttcaatctttcttcaaaagaaaggtgctccagcaaataaattatataaatataaacaaaaataattggggcaaataaatagcagtgagaagaaataaag

SEQ ID NO: 95923 - DNA, 590 bp, Chicken  19866894619204_5
cccttttgtggctattcctcaatmacagaatcacagaacagctttagatgaaagggacattaaagatcatcaagctccaacccctgccatgggytggttaccccccaccagctcaggctgcccaggaccccatccagcctgatcttgagcacctccagggatagggcacmacagctctctgggcagctgtgccagggcctcaycaccctctcagtgaaaaatcttcccctaacatttaatctaaatgacccctcttttagtttaaaactgttctttcttgtcctatcactaatctacctrtgtgaaaagttggttcctgtttatcagctccttttaagtaatgtaaggctgcactgagatgtcctcagaggtttctcttctccaagccaaacaagcccagctccttcaatctttcttcaaaagaaaggtgctccagcaaataaattatataaatataaacaaaaataattggggcaaataaatagcagtgagaagaaataaaggaaatggaaatataacaccaaaactcaagtaataagaaaccaacaaaaggcacatccctggcccccagcacacatcctgttctattt

SEQ ID NO: 95924 - DNA, 600 bp, Chicken  19866894619208_1
tcgggttgctcatccaagtctcgctgggtttcaggtttccctgcaagcgttggccgctctcggtgctcagcagccttgggacgcagctccgtgctggcaggatgggtccccgtgccaaggggacgtcagctgcgcccacgtggagctgcagaaggagtcggggccaccgcagggttatggtgtaaagctgcattgctgcggtgcgacgcagccacacgcagtgcggtttgtggtggcggtggctggggaccagcatccaccagcaggtgacaggtgtcaccccacagccacctctcatastgcgctccgagacgcctccaagccctcccttagcagccagagctctgctctctttttytccttatttgtccctatgagtttgctgggctgaagctccagctcacagccatccgaatctcactgccagcaggatcggtgctttacctgcagaaaccatttccctgccatttccactagatgtcacttccagccagaaagtcagtgctttctccagatttttcacctcctggtgcacaaagttatgccaaccctaaataggggctgcagtggccaggaggttgggttggggagtccttgggt

SEQ ID NO: 95925 - DNA, 600 bp, Chicken  19866894619208_2
ctcggtgctcagcagccttgggacgcagctccgtgctggcaggatgggtccccgtgccaaggggacgtcagctgcgcccacgtggagctgcagaaggagtcggggccaccgcagggttatggtgtaaagctgcattgctgcggtgcgacgcagccacacgcagtgcggtttgtggtggcggtggctggggaccagcatccaccagcaggtgacaggtgtcaccccacagccacctctcatastgcgctccgagacgcctccaagccctcccttagcagccagagctctgctctctttttytccttatttgtccctatgagtttgctgggctgaagctccagctcacagccatccgaatctcactgccagcaggatcggtgctttacctgcagaaaccatttccctgccatttccactagatgtcacttccagccagaaagtcagtgctttctccagatttttcacctcctggtgcacaaagttatgccaaccctaaataggggctgcagtggccaggaggttgggttggggagtccttgggttgggacgttattggatgaggatgttgttgggttgggatgaggttgggttgcgataccg

SEQ ID NO: 95926 - DNA, 600 bp, Chicken  19866894619218_1
ttcaaatacagttatggatgtaattttccagtgcaaagtatattattatccctagttgttaatctttcatgatctgtacctagaacagtgatttcagaagacaaaacacagttgaatttctaaacttagtgtttactagtcagttacaaaaaaatccttaatactgctatgctttcagatcgctgtattcagtcccagcccacagaaagacctcatgcattaaaaaaaaaaatcccttttctcagttaaacttgggatgtggatctcactgttgttatttcaaacatattattttgtaayttcttactataacaatttccatggaacccaacattagaacagcagaacagagattttctgtagcatttgtttctatggcactttaaagtaactactgtactttgacagtaatcccacaaactatttagatccctaggtctgccattcttctacgtgcagccttcattcctgaggtaggaatttaataagtcctgttctttacttcattgttttctgagaattcaaagcagacaaagttggcaaagggactctgtttgccttcaacagatcagaatactgagtcccttgttacattggact

SEQ ID NO: 95927 - DNA, 600 bp, Chicken  19866894619220_1
agttcagacttgtgactgtgggcaaatcccctcacctttctttgttcctccacttacaagataatgattttccctaaggggacgtgatgttcttctgatcagtaccaactctgacacctcgtgaagaacaagacaaagacagacaagaactgtttgctctcatatgatcctacataacccatttatgcagcatttttactatttgcatcaggagtggcaaggcaaatatgacaagaattaaggccaaaaaaggctctacagagagaacacaaagttaaccggctttcagttcctcaacayagccttggagttytgtaacatctgtgttgatgttgctcaggaacaaagcagcagtaaatgcaaaatgtcatttgctattcaaaacagaagaaatgtttcccacatcattaaatgaaatccctaggatctatttcctttcattcctgcttgtaacttgtacttttctgtgcattctccttcaacttgcctctagtttgagagctaggttctcaagcacatctaagatgtcccactgctactagygcaaactaaccaacctgggcaaccatgagcacagaaagcataaatcagatgagagga

SEQ ID NO: 95928 - DNA, 600 bp, Chicken  19866894619220_2
gactgtgggcaaatcccctcacctttctttgttcctccacttacaagataatgattttccctaaggggacgtgatgttcttctgatcagtaccaactctgacacctcgtgaagaacaagacaaagacagacaagaactgtttgctctcatatgatcctacataacccatttatgcagcatttttactatttgcatcaggagtggcaaggcaaatatgacaagaattaaggccaaaaaaggctctacagagagaacacaaagttaaccggctttcagttcctcaacayagccttggagttytgtaacatctgtgttgatgttgctcaggaacaaagcagcagtaaatgcaaaatgtcatttgctattcaaaacagaagaaatgtttcccacatcattaaatgaaatccctaggatctatttcctttcattcctgcttgtaacttgtacttttctgtgcattctccttcaacttgcctctagtttgagagctaggttctcaagcacatctaagatgtcccactgctactagygcaaactaaccaacctgggcaaccatgagcacagaaagcataaatcagatgagaggaggggaaaggtttc

SEQ ID NO: 95929 - DNA, 600 bp, Chicken  19866894619220_3
ccaaaaaaggctctacagagagaacacaaagttaaccggctttcagttcctcaacayagccttggagttytgtaacatctgtgttgatgttgctcaggaacaaagcagcagtaaatgcaaaatgtcatttgctattcaaaacagaagaaatgtttcccacatcattaaatgaaatccctaggatctatttcctttcattcctgcttgtaacttgtacttttctgtgcattctccttcaacttgcctctagtttgagagctaggttctcaagcacatctaagatgtcccactgctactagygcaaactaaccaacctgggcaaccatgagcacagaaagcataaatcagatgagaggaggggaaaggtttccatcctcatagccaacagaraaacactcaaaaaccaaaatccattctgaagactaccaggaaaaygtgaaaagaggaattcatcttccttccttgtaagtagctagacaacaaggaggagaaaaaaaagaacctgcaccatagtggagaggaaaatacaggacaaagacatctctgctgcagcagaaagacaaccagggacaacatcagctgcggcagtgaagtgttgtt

SEQ ID NO: 95930 - DNA, 600 bp, Chicken  19866894619220_4
tgctcaggaacaaagcagcagtaaatgcaaaatgtcatttgctattcaaaacagaagaaatgtttcccacatcattaaatgaaatccctaggatctatttcctttcattcctgcttgtaacttgtacttttctgtgcattctccttcaacttgcctctagtttgagagctaggttctcaagcacatctaagatgtcccactgctactagygcaaactaaccaacctgggcaaccatgagcacagaaagcataaatcagatgagaggaggggaaaggtttccatcctcatagccaacagaraaacactcaaaaaccaaaatccattctgaagactaccaggaaaaygtgaaaagaggaattcatcttccttccttgtaagtagctagacaacaaggaggagaaaaaaaagaacctgcaccatagtggagaggaaaatacaggacaaagacatctctgctgcagcagaaagacaaccagggacaacatcagctgcggcagtgaagtgttgttgctcagtatcactgtgatctggaaaccagactcagactttcagtttaaggtattagaagtaggcaagcatacttcaaacatttcaggaag

SEQ ID NO: 95931 - DNA, 600 bp, Chicken  19866894619220_5
tcaaaacagaagaaatgtttcccacatcattaaatgaaatccctaggatctatttcctttcattcctgcttgtaacttgtacttttctgtgcattctccttcaacttgcctctagtttgagagctaggttctcaagcacatctaagatgtcccactgctactagygcaaactaaccaacctgggcaaccatgagcacagaaagcataaatcagatgagaggaggggaaaggtttccatcctcatagccaacagaraaacactcaaaaaccaaaatccattctgaagactaccaggaaaaygtgaaaagaggaattcatcttccttccttgtaagtagctagacaacaaggaggagaaaaaaaagaacctgcaccatagtggagaggaaaatacaggacaaagacatctctgctgcagcagaaagacaaccagggacaacatcagctgcggcagtgaagtgttgttgctcagtatcactgtgatctggaaaccagactcagactttcagtttaaggtattagaagtaggcaagcatacttcaaacatttcaggaagcagctgttcatctgggatattaacagcttctaagctaaacctaca

SEQ ID NO: 95932 - DNA, 600 bp, Chicken  19866894619229_1
aatagaagaaaaagataaggatagaagggaatatggacgaatgcagcctagaagtgcagcagaaaactggaagaaattatagtaagagtttgtcttctcataaagccaggtggaaatacactttttggctttttaaaatgaccttttggagaatcagaatctgtttagcagcctacagaaaaatgaaaaatatcaaaaccagttatcagtttagtctataagtttcaaaaatatgacttccctaaagataatttttttgaaagtgaacagtttcatctgggaacaccaagatgggaagaratgyggaagaaacatgtgaagcctttacaacaaatctgacgctcagtccaacttctgttgaatagaaattccttcaaaatctttaatctgaacttaaacagtaatggccttacaaatccaggccactgagtaagattattagaagattttaactgagaattattaataaattactcaaacaattaattacataataaaatacagaataaagagaataaaatgaaaactgaccaaactaactggtggacagaaaacaaagcagtgtttctagttagtaaatatcagggctgaaggaacatg

SEQ ID NO: 95933 - DNA, 600 bp, Chicken  19866894619229_2
gaagaaaaagataaggatagaagggaatatggacgaatgcagcctagaagtgcagcagaaaactggaagaaattatagtaagagtttgtcttctcataaagccaggtggaaatacactttttggctttttaaaatgaccttttggagaatcagaatctgtttagcagcctacagaaaaatgaaaaatatcaaaaccagttatcagtttagtctataagtttcaaaaatatgacttccctaaagataatttttttgaaagtgaacagtttcatctgggaacaccaagatgggaagaratgyggaagaaacatgtgaagcctttacaacaaatctgacgctcagtccaacttctgttgaatagaaattccttcaaaatctttaatctgaacttaaacagtaatggccttacaaatccaggccactgagtaagattattagaagattttaactgagaattattaataaattactcaaacaattaattacataataaaatacagaataaagagaataaaatgaaaactgaccaaactaactggtggacagaaaacaaagcagtgtttctagttagtaaatatcagggctgaaggaacatgaaaa

SEQ ID NO: 95934 - DNA, 600 bp, Chicken  19866894619229_3
agggctgaaggaacatgaaaaaggaaaagagctgaaggttaaaaggacatatctgcaaaattctattgaaattaattgatgtaagatggcacaaaaggtaactcaaaatcctgaagatgacacaaacccttagcagcattttgtgcttgaacgaggtcattacacatgaaatgtaaacattttgcagaagcctgcattcaaagaactcaagctacataatgagaaacaaaatatgaatcaaatgcacattgaacaaagaactaaacttctttataggagctgctcaagataaggccacaytgagaggctttctatatcaccttgaatatgaaagatgctttatgacttacaatttagacactgatacataatttatacattttgatagaaagacagtcatactgaacatggagagataaaactcagattgtatagtggcaaaaacactcctactgtgaatggacatatgtttgttgtaaaacaaaatcttaaaaaagtggtttgcgttgtttcaggaaacagtatatatccctggatagaaaacacagcagagtctacagctcactgaaagaaatgctttggaagaaaaacggcagccaa

SEQ ID NO: 95935 - DNA, 600 bp, Chicken  19866894619233_1
gatgtatgtgccactgacagattctgctttttagtacttcctgcctgaataaatcatgtctctcatttcaggactctgcagacagtgggaccatctcatgccaggacgtacactgtagctgtttatttcaaaggggaaagaataggatgtggtaaaggcccaaggtatactggaaaaaaaaaaattaatctcatgttgttaaagtttatctgactgtgacagtgtccaaaacaacccaccatgatgaagataggtaataatctgtttagccttagagattaaagctatggagcattcctygggtcattctgagtttctgcctcaggaatacctgaagagctcgatgttggtatacttctggatcttaaacttcattttttgatcaacttaagaacaaggtgaccagcaataatctcctatttgtkgctctcagactggaaactgcagaakggagtgctggaaataacaacttcacctttggctttactgctagattattgttcagcttaggctggcaaagttggggcgcaagattctgaattttcatcagatgttatcactttttaggtattttggaatgacttctaaaattgcaaagtt

SEQ ID NO: 95936 - DNA, 600 bp, Chicken  19866894619233_2
tttcaaaggggaaagaataggatgtggtaaaggcccaaggtatactggaaaaaaaaaaattaatctcatgttgttaaagtttatctgactgtgacagtgtccaaaacaacccaccatgatgaagataggtaataatctgtttagccttagagattaaagctatggagcattcctygggtcattctgagtttctgcctcaggaatacctgaagagctcgatgttggtatacttctggatcttaaacttcattttttgatcaacttaagaacaaggtgaccagcaataatctcctatttgtkgctctcagactggaaactgcagaakggagtgctggaaataacaacttcacctttggctttactgctagattattgttcagcttaggctggcaaagttggggcgcaagattctgaattttcatcagatgttatcactttttaggtattttggaatgacttctaaaattgcaaagttttcaaccacacacaaaaaatacatcatcttattctgtgctgccaaaactggtggtgttttgaaagccaaagatatttttatagagttcagacctctgactttgttcctttttttctcacagctca

SEQ ID NO: 95937 - DNA, 600 bp, Chicken  19866894619233_3
ggtaaaggcccaaggtatactggaaaaaaaaaaattaatctcatgttgttaaagtttatctgactgtgacagtgtccaaaacaacccaccatgatgaagataggtaataatctgtttagccttagagattaaagctatggagcattcctygggtcattctgagtttctgcctcaggaatacctgaagagctcgatgttggtatacttctggatcttaaacttcattttttgatcaacttaagaacaaggtgaccagcaataatctcctatttgtkgctctcagactggaaactgcagaakggagtgctggaaataacaacttcacctttggctttactgctagattattgttcagcttaggctggcaaagttggggcgcaagattctgaattttcatcagatgttatcactttttaggtattttggaatgacttctaaaattgcaaagttttcaaccacacacaaaaaatacatcatcttattctgtgctgccaaaactggtggtgttttgaaagccaaagatatttttatagagttcagacctctgactttgttcctttttttctcacagctcaaaattttcagcaaaggataaagtag

SEQ ID NO: 95938 - DNA, 540 bp, Chicken  19866894619235_1
agcaaggagtgacttactgctcttcacaccaatgaagccattttctttaaacaaagtgcagagtaaaggtactgcatgaactttccacaacgttttctccttatctggagaagtgctaactggttaattgtttctggatagttattcttagctttttataacttgtttcagctccactatcattgggcaatctcttgatgcatttgaggtattttgtcccagttgctgtccttgagctgctttactacagtccctgcctgctgtctgattatttttctctgtgatttgtatgagactctytgaaatctggcaggatgaactccatccaatagccaggcatgttgcaaaactctctcgttagtttttgtccggcagcagcttagcaggattagttgaggaactttatgtatgttatgcagttatccaggtatctgctagaagggagtactttgtcctgatgaactctaaggaatatgaaatctaccccttacttatatttaaatagttcttcagtctaactgggataatgtaacacgcaga

SEQ ID NO: 95939 - DNA, 600 bp, Chicken  19866894619250_1
tcttcagcctgaggctgactcagacttttgcagttcaagtagccgcctctcaggaagctgtttggtttgaatgggagctgtggtgctgggaatctgtttgacagatcatgcaacttagtgcgatttaccagtcagggttggcactgacctgcctactagagttgcagcttgggggcacgtaagcaaggtgctctgcacattagctaacagtggggtgcacagcaggtgcactgattccacgtatggagccactccaggcctgcacagagaaccaaaaggaaagggcatggcctaacaggytgggggctygggttaaaacaacaacaccaaataataagctatagtgaaatactaggtagtggcagccctgtaggtgggagtagtctcaagatgttcaaaggatgatcactgctcttgatttactgggcctacatgtgagcgagtgatgagggagaggtgagagtgtaaggtaaaaaccactcttcaagattaatgaagggtttaaaataaagagtttcatggggattgaatgatgctttggtgtggtatagtggcaatttcccataaccagggttgaatctcttccctcatctttgcgaa

SEQ ID NO: 95940 - DNA, 600 bp, Chicken  19866894619250_2
tgaggctgactcagacttttgcagttcaagtagccgcctctcaggaagctgtttggtttgaatgggagctgtggtgctgggaatctgtttgacagatcatgcaacttagtgcgatttaccagtcagggttggcactgacctgcctactagagttgcagcttgggggcacgtaagcaaggtgctctgcacattagctaacagtggggtgcacagcaggtgcactgattccacgtatggagccactccaggcctgcacagagaaccaaaaggaaagggcatggcctaacaggytgggggctygggttaaaacaacaacaccaaataataagctatagtgaaatactaggtagtggcagccctgtaggtgggagtagtctcaagatgttcaaaggatgatcactgctcttgatttactgggcctacatgtgagcgagtgatgagggagaggtgagagtgtaaggtaaaaaccactcttcaagattaatgaagggtttaaaataaagagtttcatggggattgaatgatgctttggtgtggtatagtggcaatttcccataaccagggttgaatctcttccctcatctttgcgaacatgtatgc

SEQ ID NO: 95941 - DNA, 600 bp, Chicken  19866894619258_1
atgaacaatcagccatgtttttttgtttgtttgtttgtttgtttgtttgcttgtttttaagtaagctgttttataccctggctatgagtaaaaatcttgacaatatttagataagagtcccagtatcagaaaggttgaggctaaccttacaaattagagctctaaacagtcaccagagggcacaaaatgcctttggatgtaaatagaaattgtacatcaacttcctcatacttcaatcctgtttacatacttttttttacatttaaatcacactttgttgtgttcagaagtaaacagtayagcctactgactgatattagctctcattcagagctagatggccatatttatcttgctgaataaagaaaaactgacacatgtaaaaaacatttcctctactcctgtgtttgagaaataatctcaaatttatgaaagaatgttggcagtttcaaggtactcatggaaaaagtttatactaaaagtgtcagcatgtgaagctgttctcacctatttcaaaggttcagacatggctctcactctactagtggtgatgaaaaaactagaagagacatttctagggttgtgagttcccttgctctg

SEQ ID NO: 95942 - DNA, 600 bp, Chicken  19866894619265_1
ccaggaggatctgctctgtgatctcccagacagagacatgaggcacaccagaccgtatcttcctttctacatttctcaaaaatgggagtgatagttcctcttttccagagcccacagactacaccagacatccatgactttcaaatatgagagaggcttggcgaccacatcagccagtcccgtcactaccctgggattcatgtccctacagagacgtgtacacatccagcctcctcaggggctcgtaaacttgctctttgcttccagtgggtgggatcctgttcctccgactctgcctayagattcagggacatgagacaagtgggaagtgaaatacaagaagcagcttttgtaccatgaggatggtcatgtactagaataggttgtccagagaagctctgaagtatttctcctgggggatattcaaagccaattaggacacagtctaggcaacsttatctgcgtccctgctctggactctgcaggtgatctgcagacataccttcaaaactgagccactctgtatatcagatgaatatattattagtttataataatgcctctcttgtggcaatattaacgcttggtaggaaacaaacc

SEQ ID NO: 95943 - DNA, 600 bp, Chicken  19866894619265_2
gcttggcgaccacatcagccagtcccgtcactaccctgggattcatgtccctacagagacgtgtacacatccagcctcctcaggggctcgtaaacttgctctttgcttccagtgggtgggatcctgttcctccgactctgcctayagattcagggacatgagacaagtgggaagtgaaatacaagaagcagcttttgtaccatgaggatggtcatgtactagaataggttgtccagagaagctctgaagtatttctcctgggggatattcaaagccaattaggacacagtctaggcaacsttatctgcgtccctgctctggactctgcaggtgatctgcagacataccttcaaaactgagccactctgtatatcagatgaatatattattagtttataataatgcctctcttgtggcaatattaacgcttggtaggaaacaaaccacatacaccgtcaaaccttacacagccaaactctttcagtcagtttcctatcactcatctctctatcaatgctgtatccttctgtttgttattttcatttgtttactagcagacaaaatgtgtttgattgttatgaattactgaatttaaaatga

SEQ ID NO: 95944 - DNA, 600 bp, Chicken  19866894619269_1
gaataatttttctgattaaatcaggtctaaattccattgaattcactacagagccttccttctactcctttctccttcccttctgctgccttcatttcattaaaacgagggccttgggaggtctgggtaagtggctcatccctgctcatgggatgtcttgctggcagcttcttggcgtcagcacatggtgcagggtccccttccactcagctcatgtacgcaggcaagcctagtccagggggctgcccttaatggagagcatggacatgggctggaggagcaagactcccatgctgcatrctttgcagccaggtctcaggctcaaaggacctttcctgcagcagccggcacgtgcagagtgtcagcccctgtgctcccatctgcacgtgtgggtttccatcgcggccccagcactttgaacagccactttgtaggcgagtagggaagaggtaaaccaagtgtctgggagcaggaaagggggtggggaggaaggaaaataaatgtgagaaagctttagatgtcttccaagcgtccatctggtgggtccttctgatgtttccttgctgaaggcctcccactgagcatgtctcagaaggatcc

SEQ ID NO: 95945 - DNA, 600 bp, Chicken  19866894619269_2
tgggagcaggaaagggggtggggaggaaggaaaataaatgtgagaaagctttagatgtcttccaagcgtccatctggtgggtccttctgatgtttccttgctgaaggcctcccactgagcatgtctcagaaggatccctcctttctttctctcatgccaaaaactgaatcagaggcgggttttgttagcaaggggtcatgaaagctttgttcagcctgtcctgtagcctgtgcatttgtttaggaagatattgagcctatctgagacctggtgattcatattcacacaaagcagagcaamcttaacttgactgggatatgttgggaaaccagcrcctctgaaacccatccagaaggtgccaggccagataaaggcgaggacygtcccaaatcctaagccaagtgctgcactggggaggggcggaggttgctggttagtgtttctagtcgtattttgggctgctcattcattctgacttacctagggagagggagcaggggaagcatttgctgtaggcacagcagtcaggcttctgacccatggctgctctaggggaagaaaacaccttgctatgtgcctgcccttttctcagcagatctg

SEQ ID NO: 95946 - DNA, 600 bp, Chicken  19866894619269_3
taaatgtgagaaagctttagatgtcttccaagcgtccatctggtgggtccttctgatgtttccttgctgaaggcctcccactgagcatgtctcagaaggatccctcctttctttctctcatgccaaaaactgaatcagaggcgggttttgttagcaaggggtcatgaaagctttgttcagcctgtcctgtagcctgtgcatttgtttaggaagatattgagcctatctgagacctggtgattcatattcacacaaagcagagcaamcttaacttgactgggatatgttgggaaaccagcrcctctgaaacccatccagaaggtgccaggccagataaaggcgaggacygtcccaaatcctaagccaagtgctgcactggggaggggcggaggttgctggttagtgtttctagtcgtattttgggctgctcattcattctgacttacctagggagagggagcaggggaagcatttgctgtaggcacagcagtcaggcttctgacccatggctgctctaggggaagaaaacaccttgctatgtgcctgcccttttctcagcagatctggctggggtgaagaattcaggttccatgcactttt

SEQ ID NO: 95947 - DNA, 600 bp, Chicken  19866894619269_4
ccttctgatgtttccttgctgaaggcctcccactgagcatgtctcagaaggatccctcctttctttctctcatgccaaaaactgaatcagaggcgggttttgttagcaaggggtcatgaaagctttgttcagcctgtcctgtagcctgtgcatttgtttaggaagatattgagcctatctgagacctggtgattcatattcacacaaagcagagcaamcttaacttgactgggatatgttgggaaaccagcrcctctgaaacccatccagaaggtgccaggccagataaaggcgaggacygtcccaaatcctaagccaagtgctgcactggggaggggcggaggttgctggttagtgtttctagtcgtattttgggctgctcattcattctgacttacctagggagagggagcaggggaagcatttgctgtaggcacagcagtcaggcttctgacccatggctgctctaggggaagaaaacaccttgctatgtgcctgcccttttctcagcagatctggctggggtgaagaattcaggttccatgcactttttcctcctgcttcgttggggttccccagagcagctgtgctgctcctggg

SEQ ID NO: 95948 - DNA, 600 bp, Chicken  19866894619278_1
caaaccctccccctctttgatgctgtggactcctgagatgatgctcagcagaatggcaaaatggtgaccctgtggtgggacctcagagtaggtttggtgccccagaaattgggagagagatgcaaacaagtctggtttcagcccagcagcattgctgggcttcagggcatcagctttgcctctgcaacagcccctaaactgaggccaacgcaacaggggaaggatctcctgctgatgcaggtctggattcttttgtgtaactgatggaaatcctcatatagacatttctcagctgcaggyccacctgcactgcaaaacaacacatgatgaacgatgtccgtgctaagagttgttcacatcgggtcagccacagttgggcgattttggtgttggtgagttttgtccaattctaagtagttttcagctggagagggaacaattgaagcaaacctgtatttacacattgaaatggtgctgtctccatttcaaaattaatggttttttgttctgaaatgaactttgaaagtggtcgggaaggtctgggactctgaaaccatggaatcacagaatggcttgggttggaaaggaccatgagagctc

SEQ ID NO: 95949 - DNA, 600 bp, Chicken  19866894619295_1
attctagtggcagcccagttgacttgtttgacttactcgttgaccaagtatgtgtgtcaaccgactgatcagttgacaaaataaatgcgacattatagtagatctcccatttataccttagaggaagaaagttttctgttacgcgctactttgtgttcttaagcacaataaagcaaagaagtgatgcatttggaacatataagaaaacagtaacttttctattttttttatttcttttttccttttctcttgattgaaaatgtcatcaagtgcattttgtttggtaaaaaaaaaaaaaarcaatgcagctgaaaaatcttgggacctgttacctttgtttcttattctgcaggtgcttagaaatctcttccatttcattatgtatacgtaaactctgttctttttctttatttttccaaatatatttgttgtttgagcaaagaaaaaaaaaaaaaagccctttcccctgtttaattttaaacttcaggtcctttctctgctttggtgtgggtagatcacaaaactctattgatgttttgtgtggttaaggggtctggccaaacaagcagcaacaagaagagggagcaagtccacattcct

SEQ ID NO: 95950 - DNA, 599 bp, Chicken  19866894619303_1
  misc_feature (1)..(113): n is any nucleotide
nnnnnnnnnnnnnnnnnnnnnnnnnnnnnnnnnnnnnnnnnnnnnnnnnnnnnnnnnnnnnnnnnnnnnnnnnnnnnnnnnnnnnnnnnnnnnnnnnnnnnnnnnnnnnnnnntttctgctgagtgtggctgcgtgctgctatgtgtgtgctgtgctgcctggagctgtggcactgggggttggtttgtgtatgggatgcagtagcgggggggagattggtggctgggagctttgggatgtgtttgttcctgcaggggaggccttgggccggaggctgagctgctgccttgcaggaacarccaggctgcaactgctcagtgtgcaccttgctgctaactgcatcccaccctgcttcatcccccataccggtatggcagtgccacggctctcagctgctgtttgtcattatgcgttgaaagccagctttcggtatggccctcagtagaaattaaggtaagagcaattttaaaagaggtcagcagataaacactgctattttttcccctctcttgtggagaccttgatcccagtgcyatggcaggaagcagcattggctgctggtcaatgcacagtgtgcagatcagcgtggaggaacaca

SEQ ID NO: 95951 - DNA, 600 bp, Chicken  19866894619303_2
ggatgtgtttgttcctgcaggggaggccttgggccggaggctgagctgctgccttgcaggaacarccaggctgcaactgctcagtgtgcaccttgctgctaactgcatcccaccctgcttcatcccccataccggtatggcagtgccacggctctcagctgctgtttgtcattatgcgttgaaagccagctttcggtatggccctcagtagaaattaaggtaagagcaattttaaaagaggtcagcagataaacactgctattttttcccctctcttgtggagaccttgatcccagtgcyatggcaggaagcagcattggctgctggtcaatgcacagtgtgcagatcagcgtggaggaacacagctctttagcctatatttgccactcactccccaccctgtatatatatagttcttccccagcaaaacaactgccaaaaccgtgctttcccctcttcccaccttcaagttgaggtggagagcaccgatcagatgcrctgtctgcagaatgagatgctaaaaggaattwgcacaggagcaaagcactgccgaggtctgaatccaatcagcagggctgaccttatgctctgtgatgccct

SEQ ID NO: 95952 - DNA, 553 bp, Chicken  19866894619303_3
tggccctcagtagaaattaaggtaagagcaattttaaaagaggtcagcagataaacactgctattttttcccctctcttgtggagaccttgatcccagtgcyatggcaggaagcagcattggctgctggtcaatgcacagtgtgcagatcagcgtggaggaacacagctctttagcctatatttgccactcactccccaccctgtatatatatagttcttccccagcaaaacaactgccaaaaccgtgctttcccctcttcccaccttcaagttgaggtggagagcaccgatcagatgcrctgtctgcagaatgagatgctaaaaggaattwgcacaggagcaaagcactgccgaggtctgaatccaatcagcagggctgaccttatgctctgtgatgcccttaagctgggagaagctgtcccttcagtttgtggggctgatgagccgaggtggagggaatcccccacgcaccagctcccagtgtacctgcactcatcacctcagcttcagacaggtcctggcaagaggcacccagactctggtctttttctg

SEQ ID NO: 95953 - DNA, 521 bp, Chicken  19866894619303_4
tttaaaagaggtcagcagataaacactgctattttttcccctctcttgtggagaccttgatcccagtgcyatggcaggaagcagcattggctgctggtcaatgcacagtgtgcagatcagcgtggaggaacacagctctttagcctatatttgccactcactccccaccctgtatatatatagttcttccccagcaaaacaactgccaaaaccgtgctttcccctcttcccaccttcaagttgaggtggagagcaccgatcagatgcrctgtctgcagaatgagatgctaaaaggaattwgcacaggagcaaagcactgccgaggtctgaatccaatcagcagggctgaccttatgctctgtgatgcccttaagctgggagaagctgtcccttcagtttgtggggctgatgagccgaggtggagggaatcccccacgcaccagctcccagtgtacctgcactcatcacctcagcttcagacaggtcctggcaagaggcacccagactctggtctttttctg

SEQ ID NO: 95954 - DNA, 600 bp, Chicken  19866894619310_1
ttgcagatgacgatgcacaggatattagctgaactcttggttacatttactgcttagcaagtaatattctgttgtagattggaaacatcccttctccttttaagtatcttttatttcagccagagcagatgtagggtgataaacataaaaggcagactgcaggatgttaaaagatctcaaaataacatttgtagcctgaataaaattatgatgtcgaaagtgtcacatatatattttgccacatatccacttttccacaggtagcttatgtttcatacttaaaaagtgtatgcatataamccgttgtctgtgccagccggatacygggctgaatcaaaagcagtgcaaccagcagtgcaagagaggtggctgtccccctctactctgcccttgtgaggccccatctgtagaatcacattcagctctggggtccccagcacaaggaagacatgaagctgttggaatgagtccaggagaagccacaaggatgctctgaagagtggagcatctctgctatggagacaggctgagaaagttgggctttctcattttggagaaggttctggggagactttatagaagctttcctgggcctaaagg

SEQ ID NO: 95955 - DNA, 600 bp, Chicken  19866894619310_2
tagctgaactcttggttacatttactgcttagcaagtaatattctgttgtagattggaaacatcccttctccttttaagtatcttttatttcagccagagcagatgtagggtgataaacataaaaggcagactgcaggatgttaaaagatctcaaaataacatttgtagcctgaataaaattatgatgtcgaaagtgtcacatatatattttgccacatatccacttttccacaggtagcttatgtttcatacttaaaaagtgtatgcatataamccgttgtctgtgccagccggatacygggctgaatcaaaagcagtgcaaccagcagtgcaagagaggtggctgtccccctctactctgcccttgtgaggccccatctgtagaatcacattcagctctggggtccccagcacaaggaagacatgaagctgttggaatgagtccaggagaagccacaaggatgctctgaagagtggagcatctctgctatggagacaggctgagaaagttgggctttctcattttggagaaggttctggggagactttatagaagctttcctgggcctaaaggggcctacaggaaagctggggaggga

SEQ ID NO: 95956 - DNA, 600 bp, Chicken  19866894619314_1
gtgttcttaaacttttcttctcagtattaccttaggtgttctttttcctgcttatgtctacatcattatcatttccagagtccttattaggaagctcagcgactttccaggaaatgttctaagggcagttagattattgaacaactactaatttccatttatgcattgactctcttttttgactccagcctttcaagtcttgctttctcagactctgttaagcagaatttgaaggaggaggagggtgggctggtacaggtaaaggactaccggtaatttgagtttgccagagctttgaaktgcctgtacccaagtgttcacttattaagagagcaccttctgttctctgcaaagaaaatagaaacaggataatctgcattttaaattgagaaaaattaaagacactaaacaagatagaacaaaaataaaagtgttttagaaggaccttcttcttccctccttttgcacttcaggattcaaattgaattaacttggtgattttgtgttccattaaattcagcaatctgcctggctgtttccttccttctacagcagcctcccacaggctaatcccaaagaatatttttgggcgtagagaag

SEQ ID NO: 95957 - DNA, 600 bp, Chicken  19866894619316_1
ttgagaactgtagtagttaatgctgaaagccacgaaggctgataactatgaatcctttcagtacatccatttaaaatgagtgcagtgcttgaaaaggtcttgagcagacaggagcagaacccaatgttcctgcttgagcaggaagccctaccaaggcaacattccccatattttagcaagatgctctcccttgtgtgcgactgactcaacaggccgtggccccatagcttaagggacctggctgctgtcgttggctctgctgttgagctgccagccagctgctctatgacccacccctcwtcttcttctgcagaaaggagcttgctgctagccataacagcactcctgcgraaggcacactgaagggaaagggagagcagctcaacagctattctagactctcaaacgagtttgtgtatgtgtgcagtgctgactcattagcattgctctgccctcaccttggccatttatagctctgagaaagtctatctctgcccgtgctgtataattcattctatactcttatgtcattgggctcataaatacattaatgtactgtggtatgggtatacctggtcagtactggactccgtgaatgga

SEQ ID NO: 95958 - DNA, 600 bp, Chicken  19866894619316_2
atcctttcagtacatccatttaaaatgagtgcagtgcttgaaaaggtcttgagcagacaggagcagaacccaatgttcctgcttgagcaggaagccctaccaaggcaacattccccatattttagcaagatgctctcccttgtgtgcgactgactcaacaggccgtggccccatagcttaagggacctggctgctgtcgttggctctgctgttgagctgccagccagctgctctatgacccacccctcwtcttcttctgcagaaaggagcttgctgctagccataacagcactcctgcgraaggcacactgaagggaaagggagagcagctcaacagctattctagactctcaaacgagtttgtgtatgtgtgcagtgctgactcattagcattgctctgccctcaccttggccatttatagctctgagaaagtctatctctgcccgtgctgtataattcattctatactcttatgtcattgggctcataaatacattaatgtactgtggtatgggtatacctggtcagtactggactccgtgaatggagtcgttgccttttggttaccctagaaatatgcagtaaaatatcacttaaat

SEQ ID NO: 95959 - DNA, 600 bp, Chicken  19866894619322_1
gtgtgagtgttttcataccatgtacatatcactggaaaataaatagggttatctttccactcgttggtcctttcagtacagctcatgggcaattctgtcagaagttgttctgacatgcactgtggttgtacacagtgaaagaagctcctgcagctgagctcccagttcctgcagaacaggagcactggaagcttctaaaaccctcacaatccatcttccctaactgcgacattcaggataggagtctgcttcttgaccccagcttcttcagtgatacactctggagggtcaagctcatcrtatcttcttcgatagaccactcttgagattaaagttactagaaacatttccatgatgaggatctggtggcttatatctgggggaaaaaaaagaagaaaaaagagagaaaaaaaaaaaagaccatcttattaatccttgtctgtgcaaaaggaacaaatgttaccattctgttcccataacagagtgcctctcactctgggcatcaaaatcattcacagaattacagtattgctcctcaataagcatacaataaaatacacatccaaaacccaacagatttaacagtaatcatgcacgtca

SEQ ID NO: 95960 - DNA, 600 bp, Chicken  19866894619325_1
ttgaacacctccagggatggatggggcatccacagcctctctgggcagcctgaagaacacagctctcctccatgccctttacacattgcttacagcacagaaatggtttgttgtgaggttgcatgtggcaaattcttaggggatctcatatgttgaacaccaggaaaatcatccacttttttacactgcagaatatatttcaccatcatatgtatttgaaatgtattcacaattaaaaaaaaaattacagaagtgataaatgtatgtggagttaaatttctaagtcttgctctcaacackaatagkatttagaatcayagaatggcctgggttgaaaaggaccacaatgatcatcgagtttcaacccccctgctacgtacagggctttgcatagacatacagggataaagtttgaaggcagagtccgcactcatatggatgcatcctgcactattaacacaagcaggcgttagaacttgctcagccaaaatggaccagcacctgatggcagcacacaagtcaaccttattgtgtatctatttgtccctaaaccccaaggaaaaaaagaaggggaaattgaagtcttcccccatatcagca

SEQ ID NO: 95961 - DNA, 597 bp, Chicken  19866894619325_2
acctccagggatggatggggcatccacagcctctctgggcagcctgaagaacacagctctcctccatgccctttacacattgcttacagcacagaaatggtttgttgtgaggttgcatgtggcaaattcttaggggatctcatatgttgaacaccaggaaaatcatccacttttttacactgcagaatatatttcaccatcatatgtatttgaaatgtattcacaattaaaaaaaaaattacagaagtgataaatgtatgtggagttaaatttctaagtcttgctctcaacackaatagkatttagaatcayagaatggcctgggttgaaaaggaccacaatgatcatcgagtttcaacccccctgctacgtacagggctttgcatagacatacagggataaagtttgaaggcagagtccgcactcatatggatgcatcctgcactattaacacaagcaggcgttagaacttgctcagccaaaatggaccagcacctgatggcagcacacaagtcaaccttattgtgtatctatttgtccctaaaccccaaggaaaaaaagaaggggaaattgaagtcttcccccatatcagcaaat

SEQ ID NO: 95962 - DNA, 585 bp, Chicken  19866894619325_3
ggatggggcatccacagcctctctgggcagcctgaagaacacagctctcctccatgccctttacacattgcttacagcacagaaatggtttgttgtgaggttgcatgtggcaaattcttaggggatctcatatgttgaacaccaggaaaatcatccacttttttacactgcagaatatatttcaccatcatatgtatttgaaatgtattcacaattaaaaaaaaaattacagaagtgataaatgtatgtggagttaaatttctaagtcttgctctcaacackaatagkatttagaatcayagaatggcctgggttgaaaaggaccacaatgatcatcgagtttcaacccccctgctacgtacagggctttgcatagacatacagggataaagtttgaaggcagagtccgcactcatatggatgcatcctgcactattaacacaagcaggcgttagaacttgctcagccaaaatggaccagcacctgatggcagcacacaagtcaaccttattgtgtatctatttgtccctaaaccccaaggaaaaaaagaaggggaaattgaagtcttcccccatatcagcaaat

SEQ ID NO: 95963 - DNA, 600 bp, Chicken  19866894619327_1
tcctgtagaactgccatttttgtgggaactgttgaaatcagagctctcttgttcccaagggcatgagaggccctaggaacctactcacttattgaaacatttttcttgcaccaataagtccttctaacttctgttgtaagctgaaaccctcacagtacctctctgaattgtttccgcttcactacacttccgttcacactacaaggctatgctataaagccaagatgcagctgtgtctagaaattgtatatatgaacgaacagcaaactaagcaatgtggaacactgattaaaaaaatgygagatttytcactgaacaaatttagaataaacacactgcaatttcacagaagtctaaaaacttcaaggcaacaacattcaagataacccatttctgtttagactgtgctatatgtcttgtggtatccctaacctgatttctacagagcaaaaagmaaatcacacctgtgagatgaccttcccactgacaaaccaatttwctccatccttgacactatatttttattgatattgtaccaattcccttctaggaaggccaactgcttatttctatgcagaaaaatatacaagcaacacttgc

SEQ ID NO: 95964 - DNA, 600 bp, Chicken  19866894619327_2
aactgccatttttgtgggaactgttgaaatcagagctctcttgttcccaagggcatgagaggccctaggaacctactcacttattgaaacatttttcttgcaccaataagtccttctaacttctgttgtaagctgaaaccctcacagtacctctctgaattgtttccgcttcactacacttccgttcacactacaaggctatgctataaagccaagatgcagctgtgtctagaaattgtatatatgaacgaacagcaaactaagcaatgtggaacactgattaaaaaaatgygagatttytcactgaacaaatttagaataaacacactgcaatttcacagaagtctaaaaacttcaaggcaacaacattcaagataacccatttctgtttagactgtgctatatgtcttgtggtatccctaacctgatttctacagagcaaaaagmaaatcacacctgtgagatgaccttcccactgacaaaccaatttwctccatccttgacactatatttttattgatattgtaccaattcccttctaggaaggccaactgcttatttctatgcagaaaaatatacaagcaacacttgccaaaaagc

SEQ ID NO: 95965 - DNA, 539 bp, Chicken  19866894619327_3
tacctctctgaattgtttccgcttcactacacttccgttcacactacaaggctatgctataaagccaagatgcagctgtgtctagaaattgtatatatgaacgaacagcaaactaagcaatgtggaacactgattaaaaaaatgygagatttytcactgaacaaatttagaataaacacactgcaatttcacagaagtctaaaaacttcaaggcaacaacattcaagataacccatttctgtttagactgtgctatatgtcttgtggtatccctaacctgatttctacagagcaaaaagmaaatcacacctgtgagatgaccttcccactgacaaaccaatttwctccatccttgacactatatttttattgatattgtaccaattcccttctaggaaggccaactgcttatttctatgcagaaaaatatacaagcaacacttgccaaaaagctggttaaagactgtattactctacacagggttatttttcaacaaacatgcagcctgtctttgtacactgtagagagctgcttgata

SEQ ID NO: 95966 - DNA, 495 bp, Chicken  19866894619327_4
tacaaggctatgctataaagccaagatgcagctgtgtctagaaattgtatatatgaacgaacagcaaactaagcaatgtggaacactgattaaaaaaatgygagatttytcactgaacaaatttagaataaacacactgcaatttcacagaagtctaaaaacttcaaggcaacaacattcaagataacccatttctgtttagactgtgctatatgtcttgtggtatccctaacctgatttctacagagcaaaaagmaaatcacacctgtgagatgaccttcccactgacaaaccaatttwctccatccttgacactatatttttattgatattgtaccaattcccttctaggaaggccaactgcttatttctatgcagaaaaatatacaagcaacacttgccaaaaagctggttaaagactgtattactctacacagggttatttttcaacaaacatgcagcctgtctttgtacactgtagagagctgcttgata

SEQ ID NO: 95967 - DNA, 599 bp, Chicken  19866894619336_1
  misc_feature (1)..(96): n is any nucleotide
nnnnnnnnnnnnnnnnnnnnnnnnnnnnnnnnnnnnnnnnnnnnnnnnnnnnnnnnnnnnnnnnnnnnnnnnnnnnnnnnnnnnnnnnnnnnnnnntaaaattttgctcataactttatcagagtcagatcttgcaaggcatcccgtagggtaggtggaggagctacccttatctgggagacatagggaggcttgtcctggaaagaagtggccactgatgaagatctacccacaagggaccagagtgaagggctagaaagtcatgcaacaaattcctgctacataatagaagggtgacawgataaagggttctgggcctgtggtggtgcaggtgggttctgcagtgrggggcgaccaagtgtaaatgcagcacggagctggggagtgtgggcagcatcaaaaataaaggggaatgggaggagggatggttgatgatcaagggagagggtaaaaaggttagcagtgaagtgtgcaacgttctacttgctttattttctgtcctgttattgacaatcctatttctcagtcattatttaatgggcagtttgtctgagtgagaagtaagactgattgggtgcaggaagcaaagtaattaaagc

SEQ ID NO: 95968 - DNA, 599 bp, Chicken  19866894619336_2
  misc_feature (1)..(49): n is any nucleotide
nnnnnnnnnnnnnnnnnnnnnnnnnnnnnnnnnnnnnnnnnnnnnnnnntaaaattttgctcataactttatcagagtcagatcttgcaaggcatcccgtagggtaggtggaggagctacccttatctgggagacatagggaggcttgtcctggaaagaagtggccactgatgaagatctacccacaagggaccagagtgaagggctagaaagtcatgcaacaaattcctgctacataatagaagggtgacawgataaagggttctgggcctgtggtggtgcaggtgggttctgcagtgrggggcgaccaagtgtaaatgcagcacggagctggggagtgtgggcagcatcaaaaataaaggggaatgggaggagggatggttgatgatcaagggagagggtaaaaaggttagcagtgaagtgtgcaacgttctacttgctttattttctgtcctgttattgacaatcctatttctcagtcattatttaatgggcagtttgtctgagtgagaagtaagactgattgggtgcaggaagcaaagtaattaaagctgcgggataaaaaactgctttaggaaatcttatgcctactaacattc

SEQ ID NO: 95969 - DNA, 600 bp, Chicken  19866894619336_3
atgatcaagggagagggtaaaaaggttagcagtgaagtgtgcaacgttctacttgctttattttctgtcctgttattgacaatcctatttctcagtcattatttaatgggcagtttgtctgagtgagaagtaagactgattgggtgcaggaagcaaagtaattaaagctgcgggataaaaaactgctttaggaaatcttatgcctactaacattctttatatcaaagtacgtagcatctgatttaatgacatttcctaataaaataagagatttaatctgaaaactatttttctggcttkccttctgtactcttaaaagtaaactcaggctcctcaaaatactgcaagcagttctattgtcaagctattggatatccaattccatactcagtataaatgtcgttgacaaagtccagcgagaatctacaatgagagcttttgagacctaaatggctttttatttatgagttttacaggatgaacaaaactgtgtttaaagtgaaaatacatctttaacagtatgggagcttcatttgtgcaacaatgcacttagagagcagaatcatatttaataaagagatacttagtttgctattgaaa

SEQ ID NO: 95970 - DNA, 600 bp, Chicken  19866894619340_1
gcatttgacaccacctttacttaaatatagatgagtgttcaaggtgcaagacaagaaaacaacacccattatgttccttaggaaatacaagccttagatgggagcagaaattagttaattttgggtgtgaccagcaagttcaactcttagtgggaaaagattatagcaaaacaagtttgtatataattagaaaaaagaatgcattgggcaaagctattgtgttcttagagaaatacacacatgtagcagcagagattgctgtaaaagcatccatatggctgactgtaattggtcaaaaarcctttattatgattttatcttaagttcttgtgtttttcactactgatcatcactgtagtgcaaaaactggaagttaatacaccagtctatatgtagacagaaaattaatgttatttgtgtgtacttctcttgaaaattcttaagtgtttttaaatgtctacatggacacatatatacttgcatgctattttttccctccaagtttcagtaaactgctccagtactaagtactatataagttgcttgagatattgtgaccagatggttcacggggctagtaatggattatagtgctttcta

SEQ ID NO: 95971 - DNA, 600 bp, Chicken  19866894619355_1
taaaattggaagtgaggagtaatcttaaatatttattcagctttgtttaaactatactctagttgatttctaatgttgtttagcaggaaaattcatcagaatcagaagctgctaagctataaatatgtctattaaaagttcaaggcagttacaataatatcttaaaatgaggaaggtgaagcctaaatattaaagatttacactaaatagcaattgtaatagttgaaaacattattttcagagatctatgattaaatcaataacataggcttaagactgtgatgcaaattggtctgttartattggacaataaaaacagaaggcagaggtccagattctctacaaagcatctaggaagagctgagacccagagaatgggattcacaatgctaagtacacaatgcaaagtcacytcgtaactaacacacaacctccatcaaccactccacattcatatatgmagaatacatgagtggagcaagtggatattttcttaaggactgtggccttctgagagaagcacactgtagagcagggggagaagtgtgaggaagaaggaatggcaaagaagaacaattatggactgaccatattccctac

SEQ ID NO: 95972 - DNA, 600 bp, Chicken  19866894619355_2
aagctataaatatgtctattaaaagttcaaggcagttacaataatatcttaaaatgaggaaggtgaagcctaaatattaaagatttacactaaatagcaattgtaatagttgaaaacattattttcagagatctatgattaaatcaataacataggcttaagactgtgatgcaaattggtctgttartattggacaataaaaacagaaggcagaggtccagattctctacaaagcatctaggaagagctgagacccagagaatgggattcacaatgctaagtacacaatgcaaagtcacytcgtaactaacacacaacctccatcaaccactccacattcatatatgmagaatacatgagtggagcaagtggatattttcttaaggactgtggccttctgagagaagcacactgtagagcagggggagaagtgtgaggaagaaggaatggcaaagaagaacaattatggactgaccatattccctactgcctgtgccacatggcagaaagtagaaagatgatacagtagtcaggaatgaaggagtgaatttgagtctgataaaaaaaaaaagagggtgtttggtgtgagtaagatgtttt

SEQ ID NO: 95973 - DNA, 600 bp, Chicken  19866894619355_3
ttaaaatgaggaaggtgaagcctaaatattaaagatttacactaaatagcaattgtaatagttgaaaacattattttcagagatctatgattaaatcaataacataggcttaagactgtgatgcaaattggtctgttartattggacaataaaaacagaaggcagaggtccagattctctacaaagcatctaggaagagctgagacccagagaatgggattcacaatgctaagtacacaatgcaaagtcacytcgtaactaacacacaacctccatcaaccactccacattcatatatgmagaatacatgagtggagcaagtggatattttcttaaggactgtggccttctgagagaagcacactgtagagcagggggagaagtgtgaggaagaaggaatggcaaagaagaacaattatggactgaccatattccctactgcctgtgccacatggcagaaagtagaaagatgatacagtagtcaggaatgaaggagtgaatttgagtctgataaaaaaaaaaagagggtgtttggtgtgagtaagatgtttttatctttgtttctctccatacagatctactttagtaggcaataaacta

SEQ ID NO: 95974 - DNA, 600 bp, Chicken  19866894619367_1
tggcaggaattcagtcaggaaactgtagcagatatgtgaagggtgtgaggcacaccaagtgggagaccagcattacaatgtgcttagaaagaaaaggagatgaagctaccaaaacaggtggatgccttttgcaggggcgactttgtaggccctgagacaggcagtaagagaggcctgggaaaaagtcaattgtttgaacagaacaaaggagaaatgaaaatacagcaatggaaacatttttactgatctgcacataaagtggaggaaagataatccactgcacgtgccctctgaggtacrgagtctgatgacagcaagatggtggtgccaaggggacaaggacaggtgtgggtagaggcacacagcagtgctgtaagtacagtgagaaactggtgcctgaccaggtaagggaaggaaagacattgatctgatagtttgggaatggcatcaaacccagaacgagaccctctgctttcacctctgacagagatctctggtaacagttgtggaactgcttgtgacaggcttgcctctttcagatgacaatgactgaatgtgtgtgatgtaaaaaatgttgttttcctttccccgtgcagtcta

SEQ ID NO: 95975 - DNA, 599 bp, Chicken  19866894619391_1
  misc_feature (1)..(86): n is any nucleotide
nnnnnnnnnnnnnnnnnnnnnnnnnnnnnnnnnnnnnnnnnnnnnnnnnnnnnnnnnnnnnnnnnnnnnnnnnnnnnnnnnnnnnncttcagtaaatataaatctgttgtaaggatacccccctaaaatcatgctgaagattaaagtagtgcagaacaagaggttattctggaatgagtgttaggatctagcacttcacagttccaccaagccagaaagaaatgaattcttaacactttaagagaagtggcatattcatcctacttcaaaaaaatgcaagcaatacctgctactaacatygttatctgggagcagctttkyctctgttttgttacttattcattytagggctaaagtaggcaccacaagacagactagaagacagaatagaaaagagtttcgrcattggtgatgtatcactgcagagacataggaaggtagggtgtgctgtaagcataagagcagtgcaaaaatcatgactttaatctcatacgtgtgcggttgtaaatacagaattgtgctcaggaattgacagtaccttttggaaaactctgggagggttaccatcccgtatcctccacatctgctcatgagggtcc

SEQ ID NO: 95976 - DNA, 599 bp, Chicken  19866894619391_2
  misc_feature (1)..(66): n is any nucleotide
nnnnnnnnnnnnnnnnnnnnnnnnnnnnnnnnnnnnnnnnnnnnnnnnnnnnnnnnnnnnnnnnnncttcagtaaatataaatctgttgtaaggatacccccctaaaatcatgctgaagattaaagtagtgcagaacaagaggttattctggaatgagtgttaggatctagcacttcacagttccaccaagccagaaagaaatgaattcttaacactttaagagaagtggcatattcatcctacttcaaaaaaatgcaagcaatacctgctactaacatygttatctgggagcagctttkyctctgttttgttacttattcattytagggctaaagtaggcaccacaagacagactagaagacagaatagaaaagagtttcgrcattggtgatgtatcactgcagagacataggaaggtagggtgtgctgtaagcataagagcagtgcaaaaatcatgactttaatctcatacgtgtgcggttgtaaatacagaattgtgctcaggaattgacagtaccttttggaaaactctgggagggttaccatcccgtatcctccacatctgctcatgagggtccttgggtgtgcatgacaggtc

SEQ ID NO: 95977 - DNA, 599 bp, Chicken  19866894619391_3
  misc_feature (1)..(65): n is any nucleotide
nnnnnnnnnnnnnnnnnnnnnnnnnnnnnnnnnnnnnnnnnnnnnnnnnnnnnnnnnnnnnnnnncttcagtaaatataaatctgttgtaaggatacccccctaaaatcatgctgaagattaaagtagtgcagaacaagaggttattctggaatgagtgttaggatctagcacttcacagttccaccaagccagaaagaaatgaattcttaacactttaagagaagtggcatattcatcctacttcaaaaaaatgcaagcaatacctgctactaacatygttatctgggagcagctttkyctctgttttgttacttattcattytagggctaaagtaggcaccacaagacagactagaagacagaatagaaaagagtttcgrcattggtgatgtatcactgcagagacataggaaggtagggtgtgctgtaagcataagagcagtgcaaaaatcatgactttaatctcatacgtgtgcggttgtaaatacagaattgtgctcaggaattgacagtaccttttggaaaactctgggagggttaccatcccgtatcctccacatctgctcatgagggtccttgggtgtgcatgacaggtct

SEQ ID NO: 95978 - DNA, 599 bp, Chicken  19866894619391_4
  misc_feature (1)..(41): n is any nucleotide
nnnnnnnnnnnnnnnnnnnnnnnnnnnnnnnnnnnnnnnnncttcagtaaatataaatctgttgtaaggatacccccctaaaatcatgctgaagattaaagtagtgcagaacaagaggttattctggaatgagtgttaggatctagcacttcacagttccaccaagccagaaagaaatgaattcttaacactttaagagaagtggcatattcatcctacttcaaaaaaatgcaagcaatacctgctactaacatygttatctgggagcagctttkyctctgttttgttacttattcattytagggctaaagtaggcaccacaagacagactagaagacagaatagaaaagagtttcgrcattggtgatgtatcactgcagagacataggaaggtagggtgtgctgtaagcataagagcagtgcaaaaatcatgactttaatctcatacgtgtgcggttgtaaatacagaattgtgctcaggaattgacagtaccttttggaaaactctgggagggttaccatcccgtatcctccacatctgctcatgagggtccttgggtgtgcatgacaggtctcttggtgttggatctcagtacttg

SEQ ID NO: 95979 - DNA, 600 bp, Chicken  19866894619391_5
ctgttgtaaggatacccccctaaaatcatgctgaagattaaagtagtgcagaacaagaggttattctggaatgagtgttaggatctagcacttcacagttccaccaagccagaaagaaatgaattcttaacactttaagagaagtggcatattcatcctacttcaaaaaaatgcaagcaatacctgctactaacatygttatctgggagcagctttkyctctgttttgttacttattcattytagggctaaagtaggcaccacaagacagactagaagacagaatagaaaagagtttcgrcattggtgatgtatcactgcagagacataggaaggtagggtgtgctgtaagcataagagcagtgcaaaaatcatgactttaatctcatacgtgtgcggttgtaaatacagaattgtgctcaggaattgacagtaccttttggaaaactctgggagggttaccatcccgtatcctccacatctgctcatgagggtccttgggtgtgcatgacaggtctcttggtgttggatctcagtacttgtgatggactggatgaggtggacaacttttctacagccttctgagtggcttatgagctgt

SEQ ID NO: 95980 - DNA, 599 bp, Chicken  19866894619396_1
  misc_feature (1)..(134): n is any nucleotide
nnnnnnnnnnnnnnnnnnnnnnnnnnnnnnnnnnnnnnnnnnnnnnnnnnnnnnnnnnnnnnnnnnnnnnnnnnnnnnnnnnnnnnnnnnnnnnnnnnnnnnnnnnnnnnnnnnnnnnnnnnnnnnnnnnnnnnctggcaacatcttggacatgatgaccttagaatcctttagcccagaaaaggtctctatcttaaaagccaggcacgccttgagagcatctgtctgttaaaggcaaaacatcctgaactgatcttcagaaggggattcaattcatttatgcacaccagaggtacagaytgataggaagggatccccaygaccaagccaactatcacagacagcctcgttcccctcagcagctctgacaacttgccaagaggagtcagtattcattccaagcaactaaaacatataaaacctytgcggtctgtctgtccctgtaatttgctattagctgaatactctgactgacagaaagataggagcttgcatgagcacacatttagtattgaaggtgattatccccttaacatattgtacactatgaaacaaatgttaacttccccacctattaaatggcattttaaaatccctct

SEQ ID NO: 95981 - DNA, 599 bp, Chicken  19866894619396_2
  misc_feature (1)..(114): n is any nucleotide
nnnnnnnnnnnnnnnnnnnnnnnnnnnnnnnnnnnnnnnnnnnnnnnnnnnnnnnnnnnnnnnnnnnnnnnnnnnnnnnnnnnnnnnnnnnnnnnnnnnnnnnnnnnnnnnnnnctggcaacatcttggacatgatgaccttagaatcctttagcccagaaaaggtctctatcttaaaagccaggcacgccttgagagcatctgtctgttaaaggcaaaacatcctgaactgatcttcagaaggggattcaattcatttatgcacaccagaggtacagaytgataggaagggatccccaygaccaagccaactatcacagacagcctcgttcccctcagcagctctgacaacttgccaagaggagtcagtattcattccaagcaactaaaacatataaaacctytgcggtctgtctgtccctgtaatttgctattagctgaatactctgactgacagaaagataggagcttgcatgagcacacatttagtattgaaggtgattatccccttaacatattgtacactatgaaacaaatgttaacttccccacctattaaatggcattttaaaatccctctgaaaggaaggcaatttagaa

SEQ ID NO: 95982 - DNA, 599 bp, Chicken  19866894619396_3
  misc_feature (1)..(10): n is any nucleotide
nnnnnnnnnnctggcaacatcttggacatgatgaccttagaatcctttagcccagaaaaggtctctatcttaaaagccaggcacgccttgagagcatctgtctgttaaaggcaaaacatcctgaactgatcttcagaaggggattcaattcatttatgcacaccagaggtacagaytgataggaagggatccccaygaccaagccaactatcacagacagcctcgttcccctcagcagctctgacaacttgccaagaggagtcagtattcattccaagcaactaaaacatataaaacctytgcggtctgtctgtccctgtaatttgctattagctgaatactctgactgacagaaagataggagcttgcatgagcacacatttagtattgaaggtgattatccccttaacatattgtacactatgaaacaaatgttaacttccccacctattaaatggcattttaaaatccctctgaaaggaaggcaatttagaattattcacagctaaagaaagctyrgtatcagaacaggtaycggtttgatagaagtcttaacrttagtcatctggatagtcttaagggctcagctttctactgta

SEQ ID NO: 95983 - DNA, 600 bp, Chicken  19866894619396_4
agcctcgttcccctcagcagctctgacaacttgccaagaggagtcagtattcattccaagcaactaaaacatataaaacctytgcggtctgtctgtccctgtaatttgctattagctgaatactctgactgacagaaagataggagcttgcatgagcacacatttagtattgaaggtgattatccccttaacatattgtacactatgaaacaaatgttaacttccccacctattaaatggcattttaaaatccctctgaaaggaaggcaatttagaattattcacagctaaagaaagctyrgtatcagaacaggtaycggtttgatagaagtcttaacrttagtcatctggatagtcttaagggctcagctttctactgtactgaccatgaaaagcaagggaaataaagtggcgaccggtraggctacatttatgacattgtgccagaacactccacttttctctttccatattcagtcccaaatactgcttgtgttgtgccacctgatgccaggtgctgcagggcttctgctacacccatctgacattgtgatgatgcatttttaagacctttaaataataaaaatagacctttgcact

SEQ ID NO: 95984 - DNA, 600 bp, Chicken  19866894619396_5
gcctcgttcccctcagcagctctgacaacttgccaagaggagtcagtattcattccaagcaactaaaacatataaaacctytgcggtctgtctgtccctgtaatttgctattagctgaatactctgactgacagaaagataggagcttgcatgagcacacatttagtattgaaggtgattatccccttaacatattgtacactatgaaacaaatgttaacttccccacctattaaatggcattttaaaatccctctgaaaggaaggcaatttagaattattcacagctaaagaaagctyrgtatcagaacaggtaycggtttgatagaagtcttaacrttagtcatctggatagtcttaagggctcagctttctactgtactgaccatgaaaagcaagggaaataaagtggcgaccggtraggctacatttatgacattgtgccagaacactccacttttctctttccatattcagtcccaaatactgcttgtgttgtgccacctgatgccaggtgctgcagggcttctgctacacccatctgacattgtgatgatgcatttttaagacctttaaataataaaaatagacctttgcactt

SEQ ID NO: 95985 - DNA, 600 bp, Chicken  19866894619396_6
cagctctgacaacttgccaagaggagtcagtattcattccaagcaactaaaacatataaaacctytgcggtctgtctgtccctgtaatttgctattagctgaatactctgactgacagaaagataggagcttgcatgagcacacatttagtattgaaggtgattatccccttaacatattgtacactatgaaacaaatgttaacttccccacctattaaatggcattttaaaatccctctgaaaggaaggcaatttagaattattcacagctaaagaaagctyrgtatcagaacaggtaycggtttgatagaagtcttaacrttagtcatctggatagtcttaagggctcagctttctactgtactgaccatgaaaagcaagggaaataaagtggcgaccggtraggctacatttatgacattgtgccagaacactccacttttctctttccatattcagtcccaaatactgcttgtgttgtgccacctgatgccaggtgctgcagggcttctgctacacccatctgacattgtgatgatgcatttttaagacctttaaataataaaaatagacctttgcactttagcattgccctgatc

SEQ ID NO: 95986 - DNA, 600 bp, Chicken  19866894619396_7
ggagtcagtattcattccaagcaactaaaacatataaaacctytgcggtctgtctgtccctgtaatttgctattagctgaatactctgactgacagaaagataggagcttgcatgagcacacatttagtattgaaggtgattatccccttaacatattgtacactatgaaacaaatgttaacttccccacctattaaatggcattttaaaatccctctgaaaggaaggcaatttagaattattcacagctaaagaaagctyrgtatcagaacaggtaycggtttgatagaagtcttaacrttagtcatctggatagtcttaagggctcagctttctactgtactgaccatgaaaagcaagggaaataaagtggcgaccggtraggctacatttatgacattgtgccagaacactccacttttctctttccatattcagtcccaaatactgcttgtgttgtgccacctgatgccaggtgctgcagggcttctgctacacccatctgacattgtgatgatgcatttttaagacctttaaataataaaaatagacctttgcactttagcattgccctgatcaagagagctgtctgtacagatg

SEQ ID NO: 95987 - DNA, 600 bp, Chicken  19866894619396_8
actctgactgacagaaagataggagcttgcatgagcacacatttagtattgaaggtgattatccccttaacatattgtacactatgaaacaaatgttaacttccccacctattaaatggcattttaaaatccctctgaaaggaaggcaatttagaattattcacagctaaagaaagctyrgtatcagaacaggtaycggtttgatagaagtcttaacrttagtcatctggatagtcttaagggctcagctttctactgtactgaccatgaaaagcaagggaaataaagtggcgaccggtraggctacatttatgacattgtgccagaacactccacttttctctttccatattcagtcccaaatactgcttgtgttgtgccacctgatgccaggtgctgcagggcttctgctacacccatctgacattgtgatgatgcatttttaagacctttaaataataaaaatagacctttgcactttagcattgccctgatcaagagagctgtctgtacagatgatgtgaatgcctgctaacacagagagactccttacttagaggaggaaatgacaccagaagtttcagggccaaaagctccagt

SEQ ID NO: 95988 - DNA, 522 bp, Chicken  19866894619405_1
tcttaagcatcttcaaaaacaaaacaaaaacgtgccttgttgtatgatacttaattagacagcacacattttaagagcctacagtattcagtttacatggaaaagaatgaatgaactgtaggggaaaaatgggagggacatcttcatctgttcatgctcagggagttggtgcctttccaaacgtggaacagggagcacaaaattgtggtcaaaaacacagcataaaatcagtgacaacttttgaagtgatattaacattttaaaagttaaaattatttgaaacgtggtagaaaacgaacwgtttgtgaacagcgaatgaaatacactgctgaaaatctactgaagtactgagccattgaaggaaattaatcctaagtgggacttcaggagtagaatttttactttgatgaatttttcatgcttgatacatagtgatattcaactaataacgttaataaccttactatttggaaggtaattatccccataaacgagctgtgatggtttgaaaacatctgtttc

SEQ ID NO: 95989 - DNA, 599 bp, Chicken  19866894619410_1
  misc_feature (1)..(25): n is any nucleotide
nnnnnnnnnnnnnnnnnnnnnnnnnctgaaggagaacttgtttgcctgaaatgttgtcttttttgtttttaatattcagagcttattttctattacttcccttttaattgtttcttgcctttttatgtgcaggaaataataaatgggatttaagcatagacgtaagcatttctgcacctgtttaggatcaaacccagtgattctaatgctgataaaccagaaatgaccaaataatttcaatcacaaaatgatgccagagagtaccaactccctgatgtgttctctgccgtccaagtaaargaatcttgaggaaaataggccaatgtatgtattctggatattattaacacagacgattcgtccttcaattgttctgcataatgaagagaaggaaattttgaacacatgtggcatcttccattttgagttactttatgaatagcgcagataaagtcctgggtttgttcaagttttttgagagaaagtgttttaatttgggggctttagattctatttcttttgtaatagttgagaaatcgatgcagattgtgtctacacaaatgtatcgttagagtgaaaagactgtgtagtgcagcccc

SEQ ID NO: 95990 - DNA, 578 bp, Chicken  19866894619410_2
aattgttctgcataatgaagagaaggaaattttgaacacatgtggcatcttccattttgagttactttatgaatagcgcagataaagtcctgggtttgttcaagttttttgagagaaagtgttttaatttgggggctttagattctatttcttttgtaatagttgagaaatcgatgcagattgtgtctacacaaatgtatcgttagagtgaaaagactgtgtagtgcagcccctccaaggttttcagcttccattgcttgtgtgtctcaaaacgtggttactagttcattgtagcttgcrggagyggratgtagactgaggcatagtagttactgtgctcccagtacaagccagtaagagatgacacttttagaaggtagcacagcaaaaggaatttgcccaaagaggaataaacagctcgagtaattcagtattttttttaattaaaaaatattatttttataaaaataaatatatgttataaaagatataatcattacatgtattatattatttatgtataatattatagaaatattatcttttaataatggtaacaattttaaaaaaaatccaat

SEQ ID NO: 95991 - DNA, 573 bp, Chicken  19866894619410_3
ttctgcataatgaagagaaggaaattttgaacacatgtggcatcttccattttgagttactttatgaatagcgcagataaagtcctgggtttgttcaagttttttgagagaaagtgttttaatttgggggctttagattctatttcttttgtaatagttgagaaatcgatgcagattgtgtctacacaaatgtatcgttagagtgaaaagactgtgtagtgcagcccctccaaggttttcagcttccattgcttgtgtgtctcaaaacgtggttactagttcattgtagcttgcrggagyggratgtagactgaggcatagtagttactgtgctcccagtacaagccagtaagagatgacacttttagaaggtagcacagcaaaaggaatttgcccaaagaggaataaacagctcgagtaattcagtattttttttaattaaaaaatattatttttataaaaataaatatatgttataaaagatataatcattacatgtattatattatttatgtataatattatagaaatattatcttttaataatggtaacaattttaaaaaaaatccaat

SEQ ID NO: 95992 - DNA, 570 bp, Chicken  19866894619410_4
tgcataatgaagagaaggaaattttgaacacatgtggcatcttccattttgagttactttatgaatagcgcagataaagtcctgggtttgttcaagttttttgagagaaagtgttttaatttgggggctttagattctatttcttttgtaatagttgagaaatcgatgcagattgtgtctacacaaatgtatcgttagagtgaaaagactgtgtagtgcagcccctccaaggttttcagcttccattgcttgtgtgtctcaaaacgtggttactagttcattgtagcttgcrggagyggratgtagactgaggcatagtagttactgtgctcccagtacaagccagtaagagatgacacttttagaaggtagcacagcaaaaggaatttgcccaaagaggaataaacagctcgagtaattcagtattttttttaattaaaaaatattatttttataaaaataaatatatgttataaaagatataatcattacatgtattatattatttatgtataatattatagaaatattatcttttaataatggtaacaattttaaaaaaaatccaat

SEQ ID NO: 95993 - DNA, 600 bp, Chicken  19866894619413_1
taggctgctgtacagaagagcattcctatctacaaaaatgccacaaaaagggatgtggatatccacattgaccaagacaacttcctgccagaggaaatgtaaggaaaatgggagtcttttactgagcccaaacttaagacagctattagaacaaccttggaaaatgctgtgtgtgatatccccgcagtgtctactgctgttctagtgtaaaagcttcctgcaacctccagcctgttgcacagtactgaagtatagaataactacatgtagaagcttaattaactgttggccttttagagygggagaatacaaatgttgctatgctttctgtccctggaggaagcaggctgagtcctgaggaggaaggcatggtgctgcaggataatgacacaaagtagtttgtgtttgttaggcctgctaggctttatttccataaataattataattaacgtggaacaaagctgcctattctgaaaatcactgatcattttttttgtgtatgagcaagcaaacagaacttccagtgctcttcttcactttacagaatgtgaaagcaccttattaataatgaaatacaaagtctgaaactgttttgaagt

SEQ ID NO: 95994 - DNA, 600 bp, Chicken  19866894619416_1
ccatgtttttacttacaaatttgatttgggtaatccagaggaggcatcgacatgacaggcttatccctgtaaaaacgagtactacattgcttggagtttgcagcttaccctgtctttgtgcacataatgaaaagtgagtaacagacttcagaactatgtaattttacactgcccagacaaaatgatcttatcagcatgagattatccatactgtcaagattgtagatagtagctgtattttcccgtgaaagactggaaggggcactgtattcacaaaagcatctttggtattttcaaaakggatgaagtatattttagataagccagttaaatttacattctgccttatgctactgatgatttctgttgttgccattattgaatactgattttcaataaagaaaattgattacatgagctgcatgggcatcaggaaaaggtatttctagtgttgtcatcactgaagactgaataaagttgggtacatccagttgggtgcatccagttactttgagttttccttgcattactggaaaaatgacgatacattgtaagattcacttaggatatacatagtttgcagattattgaacttgtcat

SEQ ID NO: 95995 - DNA, 599 bp, Chicken  19866894619417_1
  misc_feature (1)..(118): n is any nucleotide
nnnnnnnnnnnnnnnnnnnnnnnnnnnnnnnnnnnnnnnnnnnnnnnnnnnnnnnnnnnnnnnnnnnnnnnnnnnnnnnnnnnnnnnnnnnnnnnnnnnnnnnnnnnnnnnnnnnnnngggagtgcggaggctgagtgggagaaccgatctgctcaaaaatgtgtgctcagcactgagcttccaccccaaaatcacagcttgacctggtaccaaaatgggctgttggcaggactagaaccaagtttccaggtgtctgcagactgctctgctgctgcactgcccttctacacatgaaattyagttcaacaagaatatttctgtatatgtgtaacaatgcagatatagaataagaagtaatccagaggccatggtctgttctttgaaaagtagaacttttttttttatatcaggactttgcaagctaaattgcatggcaggatgacaggaatctccagaagttctggaaagaagccgaagaggcatcatgccctttttcactaatgtcatcaattagcctttgatgtttgtgtattggcttaaatatggaatgctaagtagttgtattaacaagagcacaagtcctttagtccatatgtgt

SEQ ID NO: 95996 - DNA, 600 bp, Chicken  19866894619417_2
caacaagaatatttctgtatatgtgtaacaatgcagatatagaataagaagtaatccagaggccatggtctgttctttgaaaagtagaacttttttttttatatcaggactttgcaagctaaattgcatggcaggatgacaggaatctccagaagttctggaaagaagccgaagaggcatcatgccctttttcactaatgtcatcaattagcctttgatgtttgtgtattggcttaaatatggaatgctaagtagttgtattaacaagagcacaagtcctttagtccatatgtgtttccsctttttcctcagctgatttgttgtgtcttaaattgggatctttctggaggtagcacttgttatgcatctgtactacagtccacacaatgtgatgctgtttcctggctggtacttttwtatgtgagcacagtcatatcataaaggaataaatatcttgattatgtcaagcttaggtagttgttagtttatactcaattygttaaatgaaaagggaactctgctaacacagaatcatagaatccttagagttgcagggtacctttaaagtgaacagggacatccacaagcttctcagcctgc

SEQ ID NO: 95997 - DNA, 600 bp, Chicken  19866894619417_3
gctaaattgcatggcaggatgacaggaatctccagaagttctggaaagaagccgaagaggcatcatgccctttttcactaatgtcatcaattagcctttgatgtttgtgtattggcttaaatatggaatgctaagtagttgtattaacaagagcacaagtcctttagtccatatgtgtttccsctttttcctcagctgatttgttgtgtcttaaattgggatctttctggaggtagcacttgttatgcatctgtactacagtccacacaatgtgatgctgtttcctggctggtacttttwtatgtgagcacagtcatatcataaaggaataaatatcttgattatgtcaagcttaggtagttgttagtttatactcaattygttaaatgaaaagggaactctgctaacacagaatcatagaatccttagagttgcagggtacctttaaagtgaacagggacatccacaagcttctcagcctgctccatcctggccttgaatgtctccagggacagggtttccaccacatctccgggcagcctgttctctgcctgtggtatagaaaacattgttggttattggttttcacaaagataagtt

SEQ ID NO: 95998 - DNA, 600 bp, Chicken  19866894619417_4
tgtcatcaattagcctttgatgtttgtgtattggcttaaatatggaatgctaagtagttgtattaacaagagcacaagtcctttagtccatatgtgtttccsctttttcctcagctgatttgttgtgtcttaaattgggatctttctggaggtagcacttgttatgcatctgtactacagtccacacaatgtgatgctgtttcctggctggtacttttwtatgtgagcacagtcatatcataaaggaataaatatcttgattatgtcaagcttaggtagttgttagtttatactcaattygttaaatgaaaagggaactctgctaacacagaatcatagaatccttagagttgcagggtacctttaaagtgaacagggacatccacaagcttctcagcctgctccatcctggccttgaatgtctccagggacagggtttccaccacatctccgggcagcctgttctctgcctgtggtatagaaaacattgttggttattggttttcacaaagataagttacttcttagctatttggtgtaatacaatgcacatttctactgtacagatcagaggagttatgctgattgacggtagctgaa

SEQ ID NO: 95999 - DNA, 578 bp, Chicken  19866894619419_1
gccatggggagctggtgacccaacaggaagacccctccatgctctccatcaccacccaatgagatctagcatcccctgtccagcacgaagaccccttggtgctccccatggtcatgcaattgggtctagcttcctctgtccagtatgaagaaccctcgctggtctcagtgtccatgccatgaggcctagttgcccctctccagcatgaagacccttccatcatccccatgtccatgctgtagagctgcctgcattggcacagccaagctccctgggacggaggtgtctcactgtccccamactgtgacaccccctcgtgacccttgcaggtgacggggctgagtgtgacgagctgccgggcgcagctggtggtcttccacacgcagaaccacgatgacctggccgtctgcctgcacaagacacagccgcggggagacgagcgggtgggcgagctggtgggcgtcctgctggagcactgccgaacgtgagtggggctgagtcctaccaaccccaagggacacccagcggggggcagcacagccccccagggtgaccacagccctgtgctgaagctgtgt

SEQ ID NO: 96000 - DNA, 599 bp, Chicken  19866894619421_1
  misc_feature (1)..(85): n is any nucleotide
nnnnnnnnnnnnnnnnnnnnnnnnnnnnnnnnnnnnnnnnnnnnnnnnnnnnnnnnnnnnnnnnnnnnnnnnnnnnnnnnnnnnntagtttgttgggtttttttggtaagtcgactttggtgaagtcagttacacatgcacacagaatcctgaaagtcactatgtggactggagcaatgtgggtcaaataggataaaggcttagagctctgatccctgattaagagtcagttttgtggagtgcatttaaggaaattctgtccttctggtgttctgtttgggtttcagttgatgagaaaaytattgtgaaggagatagtttttttaatcggtgttttgagctcttccactaactggctgttgcatgggcctracttactcttatgacttgccttgggtgacgcagagctttttgcttcagtgtmtttgttaaaattatatcaatcaatatccactgtcaggtgacagaagagagttaactgacagcatttacatcatggtattccacaaccatgaaactgtgacatttttatggtgtgagaaactccgcatgatttgtatagcctttttaagcacgagggttgcagcttgtctgcgtgcc

SEQ ID NO: 96001 - DNA, 599 bp, Chicken  19866894619421_2
  misc_feature (1)..(14): n is any nucleotide
nnnnnnnnnnnnnntagtttgttgggtttttttggtaagtcgactttggtgaagtcagttacacatgcacacagaatcctgaaagtcactatgtggactggagcaatgtgggtcaaataggataaaggcttagagctctgatccctgattaagagtcagttttgtggagtgcatttaaggaaattctgtccttctggtgttctgtttgggtttcagttgatgagaaaaytattgtgaaggagatagtttttttaatcggtgttttgagctcttccactaactggctgttgcatgggcctracttactcttatgacttgccttgggtgacgcagagctttttgcttcagtgtmtttgttaaaattatatcaatcaatatccactgtcaggtgacagaagagagttaactgacagcatttacatcatggtattccacaaccatgaaactgtgacatttttatggtgtgagaaactccgcatgatttgtatagcctttttaagcacgagggttgcagcttgtctgcgtgccacggctggcaacagtcctgcagaagagcacatttcaaacagacgtgcaggctgcctgctgggcatggagaa

SEQ ID NO: 96002 - DNA, 600 bp, Chicken  19866894619421_3
agtcagttacacatgcacacagaatcctgaaagtcactatgtggactggagcaatgtgggtcaaataggataaaggcttagagctctgatccctgattaagagtcagttttgtggagtgcatttaaggaaattctgtccttctggtgttctgtttgggtttcagttgatgagaaaaytattgtgaaggagatagtttttttaatcggtgttttgagctcttccactaactggctgttgcatgggcctracttactcttatgacttgccttgggtgacgcagagctttttgcttcagtgtmtttgttaaaattatatcaatcaatatccactgtcaggtgacagaagagagttaactgacagcatttacatcatggtattccacaaccatgaaactgtgacatttttatggtgtgagaaactccgcatgatttgtatagcctttttaagcacgagggttgcagcttgtctgcgtgccacggctggcaacagtcctgcagaagagcacatttcaaacagacgtgcaggctgcctgctgggcatggagaacatgtgcacgtgtctccatttcttgtgtaatgctaacgttttcagcacaaatg

SEQ ID NO: 96003 - DNA, 600 bp, Chicken  19866894619421_4
tccactgtcaggtgacagaagagagttaactgacagcatttacatcatggtattccacaaccatgaaactgtgacatttttatggtgtgagaaactccgcatgatttgtatagcctttttaagcacgagggttgcagcttgtctgcgtgccacggctggcaacagtcctgcagaagagcacatttcaaacagacgtgcaggctgcctgctgggcatggagaacatgtgcacgtgtctccatttcttgtgtaatgctaacgttttcagcacaaatgaactcatcccttttctttcttcctyccttttctcatgtccagtgctgactctaccgctccctgttatctctatccccattcaaaggatgctggatgagagctagctactgctgcagctccttcctgattgaagactaaaatgcctgaaagggcttttatgctaccagaagtcttgctttttttctactgaagcaacatatacttctcaagatcaactgaactttaggaacttgttctttccataagacctggcaattagttgccctataaacagttcttttttatgagctactggctgcttaaaacacatcgtcagagctttgat

SEQ ID NO: 96004 - DNA, 600 bp, Chicken  19866894619437_1
gctcacagccttctccacgctgtacattatctctgctgaagtacagctcagaggcaggaagtgcttaacgcatagctgatggaaatgaagggggacagatgaaacacctataggtaaagagaggggacaacaagtaaactatcacactattttattttcactcttttgcccactgtgttccacctttattttttcttccagccatctgcagcatgccactgtcacagctaacatgtcacacatctgcacccagggcacaaacagcagagagagtcccagtgccagcttagaaaacaacaraaaatccatcatagtgaaaatgcaaagcagtagtagcattcctgtgcctttttcattgcagaaagatgtcattcagcctggaataattcctatttaggaagtagatttaatttaagccatcagccacatctctggtcagagagggagatcaggaatgacactatttcaacacggcctgggtctgtactcctgttttagtcctctgcatcagataaagcagaactttatgcggagtttggtctgctgcaaaatggtaaatgtcctaaacttaacagcatagtttcacttatcaattaaact

SEQ ID NO: 96005 - DNA, 600 bp, Chicken  19866894619458_1
ccaagccagtacctgaatagtagttctgtacttcaagcctgcattcagctgagtctctaaagggcattcaggtcttcttttgaagatctgtaaactttgttgacctttttcttgtatgtgactgtttcagttcctaacttgtgtcacattttattttacgtttgatacacctccagtttgtctcacttattatttcctacaggtttaaaaataatgaattgctgtgggaataatgctaacttttaaatattatttttttctctgcattttgtgtgtacaccacaagaaacttgtattcckggtactgttaatccccagttgcatccatccatgagatgtctaacaggaccctgggaaaagctaatgtttgttaccatcacttcttacatgttaattgaatggacttcctaggttagagccttccttatcctagaatggcttgggttggaagggccctcagagatcatctggtttcagccccactgctgtgctgcagtgggtggtgacttgtaggacttcctgactgctgcacgttcctcctccttccattcatactatgtggttgtaggagaggaatggaaagctccagtacgtcagcta

SEQ ID NO: 96006 - DNA, 600 bp, Chicken  19866894619463_1
atgagagatgttgcatcttacccttgactggctgttaacatagtttcaggaggaagatatggtttgtctttttctatgctttacagatacaatcaggtgagaaagtgttgtactttatgatacagtgtacttggcctaacagcgctttggcagccaggtttgctgtcaggagccattaaagcattcgtacaaatactgatgttcactgtgcatggagacagccgcttccagcatggacttaggttagagtcatgtgcagcacctgtgggcatgcaggttctctggatggttttctccctygagatgtgcccacaaaaggtggctcatcggccatatagcagcttcttacctctggaggctgcttatctctggttgtccttggcctgcaagtcttcaaacagaagatttcttggacttgtccatgtgttgaagttgttcaacagcaagctttgagacaaagttgccggctgtcttagacttctccaagaattgcctgcccttgttcatctgccagaaacagtctcttacatctattggccaaaggacattgctgacttgaaatttagatttgaaatgtatctgcactggtttgctaggatt

SEQ ID NO: 96007 - DNA, 600 bp, Chicken  19866894619467_1
ctctgggaagaccttcttcttggtgtttgttgggctttctctttttttcaatgtttttaaggtttacttctagaataggcaagaatggagagaaccttccattctattgcactctgttgcttagggatctatggaacatatgggagaaaatgtcatggcctatcagtttgtgcattttgatctgcttgaatcgtctgagaaataatagctgctgcttgtttaaccatttagttttagaatctttttgccattggtttgggcacacagcatcccactgcaaccctctggtcgttctgctamggagaattaagcattgctttttggaaaagggtgctgttgggttttcaaggaacaggattttttgcccctagacttcatatttatcctttactctggtgaacgtgccatcagcaatatacatagctgagggaaaagagcaaaagagcaatttaaaaacggggatggtagaaactggagagcgagagagtgggaaaatgcaaaggaaattgtaacagctgagatgaaaggaagagagattattttaatgggtaagtggttgctataaagtttaagttgctataaagttaatgtttattaagc

SEQ ID NO: 96008 - DNA, 599 bp, Chicken  19866894619468_1
  misc_feature (1)..(60): n is any nucleotide
nnnnnnnnnnnnnnnnnnnnnnnnnnnnnnnnnnnnnnnnnnnnnnnnnnnnnnnnnnnnttaactctgggcttggattggtgagcccatcgctgtcagaacactgaggtttcatccttcttatgcactcagaaacttccccccttccaccatggcgtgaaacgatcacaacgcagctcagcccggagccaggatccaggaaacatggcaagatttcaatgaaaatcgcatatgtcggcttactaaaaataataaaaggtgccgatttcgtgctggaaagggaacagaagttctcttgcrgtatgcctgactgcctccttttactgattccagacgccaggccaggcaggctctggctattttcaccactgtgttatcactccgcaatatgtcagcaaattcttgtacaaacatgatttttttaaaagccacgttttatcacttcttttacataatcatgaatgatagtgaatctaatctgaattgggcttgaaggaggcacaagaacaatgaagtgtctttaccacgggggagcacatcgtgtgcttttcttcctcgagccacgcatcactttataaccaattccattcaaggctgaa

SEQ ID NO: 96009 - DNA, 600 bp, Chicken  19866894619500_1
tattatgagtgcctaccgttgttgcaaaatgtagaagaaaatggaaaatggctctccagggtacaatgtatttttgaggatggatttgaaaacatacaccaaaagttaatgaggaataaattgtaacttctttagtttaattgccagtgcatctcgtttacctgagctactaaaatttaaaaaatataaataaaaatcaataaaaagacaaatttgacaaagcattttgaaacttctgacagtttctttgtgtcataaagtgtttttatactaagtaagccgcatcttacaaagacgacygtgggaaatgatrtctgcgctgtggtaatcctgtgttggacttgctagatacgatccggttaggttgttaacgcagaaggctccacaggcacgcaaccaaagggaataaagggattcttgagctctcaagagagagagaaaagttgcatcgtacggattctcaacagtttatttatagagtaaacgtaaacctgatactaggcagtaaacgggtgttaaacagtcctgagaagtgacattccttgtctttttccactcccttctgttttctgataaacgtacatcggtgactcgtagagt

SEQ ID NO: 96010 - DNA, 600 bp, Chicken  19866894619500_2
taccgttgttgcaaaatgtagaagaaaatggaaaatggctctccagggtacaatgtatttttgaggatggatttgaaaacatacaccaaaagttaatgaggaataaattgtaacttctttagtttaattgccagtgcatctcgtttacctgagctactaaaatttaaaaaatataaataaaaatcaataaaaagacaaatttgacaaagcattttgaaacttctgacagtttctttgtgtcataaagtgtttttatactaagtaagccgcatcttacaaagacgacygtgggaaatgatrtctgcgctgtggtaatcctgtgttggacttgctagatacgatccggttaggttgttaacgcagaaggctccacaggcacgcaaccaaagggaataaagggattcttgagctctcaagagagagagaaaagttgcatcgtacggattctcaacagtttatttatagagtaaacgtaaacctgatactaggcagtaaacgggtgttaaacagtcctgagaagtgacattccttgtctttttccactcccttctgttttctgataaacgtacatcggtgactcgtagagtgccacagaagtgt

SEQ ID NO: 96011 - DNA, 599 bp, Chicken  19866894619522_1
  misc_feature (1)..(124): n is any nucleotide
nnnnnnnnnnnnnnnnnnnnnnnnnnnnnnnnnnnnnnnnnnnnnnnnnnnnnnnnnnnnnnnnnnnnnnnnnnnnnnnnnnnnnnnnnnnnnnnnnnnnnnnnnnnnnnnnnnnnnnnnnnnnccagtcagaatccatgagctctcctgcagcagaatgccctttagttcccacttgtctttcatattcttgggtgcttgagcagctttcctctaagaactctgagtcctgctcaatttagtgccaaagaggtttgacaaagatgcactttctggagccttgttcccagcgcactgctmcatacttgtgcggtgctgggacccaggcactgagatcctacagcaaacagagcctgagaatgaaatcacacctcctgtgatgaagggtttataatgtcagcatgagatcagagacaacagacagatccatgcaagataagcacagctgcaccagaagaactctcctggtcagacagaagtgccactgcatgggcaggttcagtgccatcaaaccttttccttaggtacagaaatggctttgtgggagctcttcccacgtctgtttgctaggatatttaacaagttatttgctagctttt

SEQ ID NO: 96012 - DNA, 583 bp, Chicken  19866894619533_1
acagaaaaaaaaaaaaaggcatcaattgctctcataatggaaatgattcaaggaaaagtggagaggaaaaaataaacaggggtgctcttgagcctgagaaagaaaaggatccttttatactatgtgcgtgacacaaaggagaacacaaagacattttatgtcatcatttagagttatgcttttttataaaaacaagtggtctgaaatctgacatgaccttcagggtcatgggtccaaatcctagggacacaatcagtacagtcttttagctcctctcctaagggcaagcccactgcaaastgaaaacagtccagtgacatggtcagtgggaaagctgcttctcctcagtacaaacatttttccagtaactggtgctattttaaagatctgcaagtgtactttgacaggttctgggactgctgaaaagaccttacaattaaaggctgtttccagctccaccgagtatttgactctgaaaaaaaaaatggtgctctgggaacaaatacaagcaggtcatctgactagtgctagaagctaaaaatagttcttcttttcagtcacttctaacctccaaatctctgtt

SEQ ID NO: 96013 - DNA, 600 bp, Chicken  19866894619534_1
tggtctgctttcccatagcccatcataatccattgttctctcccttaaaggaataatattttttttccacaaactccaattcacttttttattactattccctgttgacataattaaaaattaaatttatgatgaaaccaaggtgattcagtgttgaactctgagaaagagtttcagcatcttcctgtttggtacgttatactacacaagatgactcttagatcttaaagaattctgtaagatgtcaaactcctaatacaattgcactgtcctagttggacagacaaaataagtcatatrcagacacatgtttacatatatatattcatagtctttacctgattttaattacagaattgaaagtcttcactatttcccacaaaataattatttcctcaaaagcatactctaagatgacaaaagattcagaacaaagagaagaaaataaactataggcctacaagaagagggaagcagaaaacaaaaccagaaaaggaatgaggattgaactcaagccaaaataaaataaaggaaaataaaatttacaaagagaaagaaaacaaattagagacagaaatattaaaaaataaagacggaaag

SEQ ID NO: 96014 - DNA, 600 bp, Chicken  19866894619536_1
gtatccatgctgttacctcagccagctactgggataatgatcaagtctgtaattcagcttaaaggatctgtaggtctgtgtgccgataatgctatgctgcaaaatgtttatcattggtggcagactaagctcaccattactccggcttctggcttgcgttctgttttcagttgtaaatacgtgatgagagatcccattgtgctttttgccttttaaaaacacattgttttcctctctctcttggtacctcaccaaaaaataattttaaattgtcattttccaatgtgacttgttaatctyttcaggaaatgtgtaataccaccttttagttaactatacagttgcaaatatacatagagtataatacaatatasgtgtgttggcaaaaactgattttttaaggctgtcttctgttagtaaaaagatggaagatggagcttgatttatatttaccagattttcttttccaccagtctcctctccmatctccctttattctctcatttttccttcctttctcgttaactcctaacatagggaaaatttgactcctcagcataaagctggcgttcaaaatatttgttgttcttcccacatgtc

SEQ ID NO: 96015 - DNA, 600 bp, Chicken  19866894619536_2
tctgtgtgccgataatgctatgctgcaaaatgtttatcattggtggcagactaagctcaccattactccggcttctggcttgcgttctgttttcagttgtaaatacgtgatgagagatcccattgtgctttttgccttttaaaaacacattgttttcctctctctcttggtacctcaccaaaaaataattttaaattgtcattttccaatgtgacttgttaatctyttcaggaaatgtgtaataccaccttttagttaactatacagttgcaaatatacatagagtataatacaatatasgtgtgttggcaaaaactgattttttaaggctgtcttctgttagtaaaaagatggaagatggagcttgatttatatttaccagattttcttttccaccagtctcctctccmatctccctttattctctcatttttccttcctttctcgttaactcctaacatagggaaaatttgactcctcagcataaagctggcgttcaaaatatttgttgttcttcccacatgtcagcacatctagatgtgatgataagcttcaatatagcatcataatattggtgtggtgatttattttagtttgtgc

SEQ ID NO: 96016 - DNA, 575 bp, Chicken  19866894619536_3
tgagagatcccattgtgctttttgccttttaaaaacacattgttttcctctctctcttggtacctcaccaaaaaataattttaaattgtcattttccaatgtgacttgttaatctyttcaggaaatgtgtaataccaccttttagttaactatacagttgcaaatatacatagagtataatacaatatasgtgtgttggcaaaaactgattttttaaggctgtcttctgttagtaaaaagatggaagatggagcttgatttatatttaccagattttcttttccaccagtctcctctccmatctccctttattctctcatttttccttcctttctcgttaactcctaacatagggaaaatttgactcctcagcataaagctggcgttcaaaatatttgttgttcttcccacatgtcagcacatctagatgtgatgataagcttcaatatagcatcataatattggtgtggtgatttattttagtttgtgctagtgcttttatctgaaattggctgaaatctttttttctgatactcattcttcctttctctctttgctcattgctacttcttttt

SEQ ID NO: 96017 - DNA, 600 bp, Chicken  19866894619538_1
ctgaatatttttaaattgatattccaattcagtacagtagtgaaactgatcaaagcagtgttgctgttgagacaagtcagagtagttgcagcagctatggtttctgaatacagttagattacttaaatgtgatttttctttttcatccttctcccttcttaaaatagttgcttttcactctaaagaccactttttttatttttaatcttcctgagagccctgtaatttgtggtagatctcttgtttgaatgtagtttgcttacattttccttttttggtagggtattttgtggtattttyacttgtctgattttatgcaacagccagaagttattaagggttattgccttttgacttcttgcttctttatggaatatttgagttagtaatgcagatatttgtaaaattctcaactttactgtgtttgagtgaaacacagcagagtctggttatatttgcaggcctaaagttagttagcacttgattacatcacatagatttatggctgtacaaaaatacttcaagcttaaacactgagaaatgtgcatatatacatataaacttttatacacatatataagatatatatgtacatatata

SEQ ID NO: 96018 - DNA, 599 bp, Chicken  19866894878268_1
  misc_feature (1)..(29): n is any nucleotide
nnnnnnnnnnnnnnnnnnnnnnnnnnnnnaaatgtgtctttttctgctgctgcttctgctgtattacagacttttttgcctttttaggagcagagtgtgtcatctcccagctcttctcctcaacctgcatgtcagctgcttggtagcacactgcaggctaccagtaagcacaactagaagccaatgagacaggagcatctttgaagattcagatgcagtgctccccttgagatgacttgctatgtcagattaaaagccctctgtgtatccagacagggacatttcaagcagccaaaataytagatgaatatgataacattgtgatgcaggarcatcaaagttgcttagcttctagagccagatgaacagcacaggcagaataatttgattcagacaccctctcagtgtatcattccttccttaatcatctggatttttgtttaaatgctatctgmtttattcaactgcacgcatcatctgcaaggtcacccatttgtttcacatatgtaactgaatgtccctttctgaccttcctctccccagttctctctgttccccaggtaaacaagtggagcccaaatctggtggtgttggatgca

SEQ ID NO: 96019 - DNA, 600 bp, Chicken  19866894878268_2
tgtgtctttttctgctgctgcttctgctgtattacagacttttttgcctttttaggagcagagtgtgtcatctcccagctcttctcctcaacctgcatgtcagctgcttggtagcacactgcaggctaccagtaagcacaactagaagccaatgagacaggagcatctttgaagattcagatgcagtgctccccttgagatgacttgctatgtcagattaaaagccctctgtgtatccagacagggacatttcaagcagccaaaataytagatgaatatgataacattgtgatgcaggarcatcaaagttgcttagcttctagagccagatgaacagcacaggcagaataatttgattcagacaccctctcagtgtatcattccttccttaatcatctggatttttgtttaaatgctatctgmtttattcaactgcacgcatcatctgcaaggtcacccatttgtttcacatatgtaactgaatgtccctttctgaccttcctctccccagttctctctgttccccaggtaaacaagtggagcccaaatctggtggtgttggatgcaatttgatctcagctggatatctcactgtgctcg

SEQ ID NO: 96020 - DNA, 600 bp, Chicken  19866894878268_3
ggctaccagtaagcacaactagaagccaatgagacaggagcatctttgaagattcagatgcagtgctccccttgagatgacttgctatgtcagattaaaagccctctgtgtatccagacagggacatttcaagcagccaaaataytagatgaatatgataacattgtgatgcaggarcatcaaagttgcttagcttctagagccagatgaacagcacaggcagaataatttgattcagacaccctctcagtgtatcattccttccttaatcatctggatttttgtttaaatgctatctgmtttattcaactgcacgcatcatctgcaaggtcacccatttgtttcacatatgtaactgaatgtccctttctgaccttcctctccccagttctctctgttccccaggtaaacaagtggagcccaaatctggtggtgttggatgcaatttgatctcagctggatatctcactgtgctcggtcacaccgacctgttgcagattggtgtttattatattcattcacgcttaggaaagtaagtaaataaagaatctactccccccagaatgtaactcaacatcccaaaacaattatggattaatt

SEQ ID NO: 96021 - DNA, 599 bp, Chicken  19866894878396_1
  misc_feature (1)..(182): n is any nucleotide
nnnnnnnnnnnnnnnnnnnnnnnnnnnnnnnnnnnnnnnnnnnnnnnnnnnnnnnnnnnnnnnnnnnnnnnnnnnnnnnnnnnnnnnnnnnnnnnnnnnnnnnnnnnnnnnnnnnnnnnnnnnnnnnnnnnnnnnnnnnnnnnnnnnnnnnnnnnnnnnnnnnnnnnnnnnnnnnnnnnnnnaataataataataaaaaaaatgagaacaaatctcttattagtttaggttttattgttattttctacatgaaattttgtttttcaatagaaatgcattgaccaaacctcaaatacatcragtcttacatgcaatagttcctactatcacattcttctttcctataagcagagttsttgtgaatggaaataagtgtatttaaccagtcaattcaatgcagggtttcttgctaacacaaagtttttatttagcattgcttttaggagctgctttctagcaccctattgggaagcagttaatggccttgccacrgacatcccagtttcatggcttcccacygractgaagctaagcaaaatatttaagcagaaggtgttcaccagccagaaaaccaaaacacacttagatttcacaacatc

SEQ ID NO: 96022 - DNA, 599 bp, Chicken  19866894878396_2
  misc_feature (1)..(126): n is any nucleotide
nnnnnnnnnnnnnnnnnnnnnnnnnnnnnnnnnnnnnnnnnnnnnnnnnnnnnnnnnnnnnnnnnnnnnnnnnnnnnnnnnnnnnnnnnnnnnnnnnnnnnnnnnnnnnnnnnnnnnnnnnnnnnnaataataataataaaaaaaatgagaacaaatctcttattagtttaggttttattgttattttctacatgaaattttgtttttcaatagaaatgcattgaccaaacctcaaatacatcragtcttacatgcaatagttcctactatcacattcttctttcctataagcagagttsttgtgaatggaaataagtgtatttaaccagtcaattcaatgcagggtttcttgctaacacaaagtttttatttagcattgcttttaggagctgctttctagcaccctattgggaagcagttaatggccttgccacrgacatcccagtttcatggcttcccacygractgaagctaagcaaaatatttaagcagaaggtgttcaccagccagaaaaccaaaacacacttagatttcacaacatctcccctcatcaccaggagctactaaaagcatgtcaagcatattttgtaaactgcat

SEQ ID NO: 96023 - DNA, 600 bp, Chicken  19866894878396_3
ataaaaaaaatgagaacaaatctcttattagtttaggttttattgttattttctacatgaaattttgtttttcaatagaaatgcattgaccaaacctcaaatacatcragtcttacatgcaatagttcctactatcacattcttctttcctataagcagagttsttgtgaatggaaataagtgtatttaaccagtcaattcaatgcagggtttcttgctaacacaaagtttttatttagcattgcttttaggagctgctttctagcaccctattgggaagcagttaatggccttgccacrgacatcccagtttcatggcttcccacygractgaagctaagcaaaatatttaagcagaaggtgttcaccagccagaaaaccaaaacacacttagatttcacaacatctcccctcatcaccaggagctactaaaagcatgtcaagcatattttgtaaactgcatactcatgggtatttgaatgaagatcaagattgcatccactgcattgagggcccattggcctacagtcaggtttcatgggggatcacacaacaccggaaataagattgtttaccactaagatataaacagtttcctgt

SEQ ID NO: 96024 - DNA, 600 bp, Chicken  19866894878396_4
ttagtttaggttttattgttattttctacatgaaattttgtttttcaatagaaatgcattgaccaaacctcaaatacatcragtcttacatgcaatagttcctactatcacattcttctttcctataagcagagttsttgtgaatggaaataagtgtatttaaccagtcaattcaatgcagggtttcttgctaacacaaagtttttatttagcattgcttttaggagctgctttctagcaccctattgggaagcagttaatggccttgccacrgacatcccagtttcatggcttcccacygractgaagctaagcaaaatatttaagcagaaggtgttcaccagccagaaaaccaaaacacacttagatttcacaacatctcccctcatcaccaggagctactaaaagcatgtcaagcatattttgtaaactgcatactcatgggtatttgaatgaagatcaagattgcatccactgcattgagggcccattggcctacagtcaggtttcatgggggatcacacaacaccggaaataagattgtttaccactaagatataaacagtttcctgtgggataggttggaaatatctagactga

SEQ ID NO: 96025 - DNA, 600 bp, Chicken  19866894878396_5
agtttaggttttattgttattttctacatgaaattttgtttttcaatagaaatgcattgaccaaacctcaaatacatcragtcttacatgcaatagttcctactatcacattcttctttcctataagcagagttsttgtgaatggaaataagtgtatttaaccagtcaattcaatgcagggtttcttgctaacacaaagtttttatttagcattgcttttaggagctgctttctagcaccctattgggaagcagttaatggccttgccacrgacatcccagtttcatggcttcccacygractgaagctaagcaaaatatttaagcagaaggtgttcaccagccagaaaaccaaaacacacttagatttcacaacatctcccctcatcaccaggagctactaaaagcatgtcaagcatattttgtaaactgcatactcatgggtatttgaatgaagatcaagattgcatccactgcattgagggcccattggcctacagtcaggtttcatgggggatcacacaacaccggaaataagattgtttaccactaagatataaacagtttcctgtgggataggttggaaatatctagactgagc

SEQ ID NO: 96026 - DNA, 563 bp, Chicken  19866894878453_1
gttcgggccttcatgtggggcttcctgtggaaatagccccaaaccatcagccagcagtgtgccctggcagccgagaaggcccccagcagcccgagatgcgccgcacggagcacagccagcagggcagggagccgctcctcccctctgctctgccctgcgggggcacatcgggagcgctgagcagagcgcagggctgcccggctccgggcagatgggaactgctgcagagagcccagctgtggggcgggggggcccggagcacctcctgatggggcaggctgagagccccgggctgtgccwgcaggagagcagtgctgatggatatctgaagggggggctgggctctgctgggtgccgcccaatgccaggacaaggagcagcgggcacagaatggaacacagaacgttccgtctgaacgtgaggaaccacttcttccccataaggggggcagagccctggaacagagcccgggagaggtgggggggatctccctctctaaagccattcgaacccacctggatgctttcctgtgcaacctcctgcagggaacctgctctgggggg

SEQ ID NO: 96027 - DNA, 600 bp, Chicken  19866894878471_1
aagagagatgaactgaaaatctctcctgcctgagtgaaatatttattcagcctgggaacagatttacttctgaaccttctataaatacagctgagggcaccatttaatcccttaccagaagacccaattttacttgttttatgttttaaaatacttctgccttttcaaagccctgtcagcaggtgacagagggcagaggtgatggcaccccaatgggcgatggcagcggggctgctgacgcggggatggggcgcgtgcagccacaccaactgctgttcacttcttacacccgagcacagmggctgctggggatggggtgggccgagagaggccgaattctgcacagagggacctttgtccccactcgcacagcatttccctgtgctcagctgcttggaagagacccccagccccatagctccatcctccccctgcccaccagggcccagtgggcagactgtgcccacctcgggtgattacatccccccactccatccatagccaaactggaggtgttacaatgggcactgtgttgggcaacgtgccgtgagccaacccctctccccactccttccccacgcaggaatgcaccaagcgaga

SEQ ID NO: 96028 - DNA, 534 bp, Chicken  19866894878491_1
ataacacagatgtgtattttgtatttgaagttcagtttttaatgaggtttgagctctatgttatgcctttccttagtaaaaagaaacaatagcctctgtatttcccagtggtgctcatttctgatgcagacttgctgtcaaactgacaccatgctgcagaaatacatacaaacagaaggccttcatataccagaaaattaacaatttagcaagcagaatgtataattcatacagcctaaaaggacagtaggctccaaaaactagaaataccttgccagcttgagggtctttttttaaatkttaagacatttatgaacatcacatcgaaatataattcttacatattgccagattgtctgaagtcaatcctaccatcttaactgctctctggttgaaaaaaaagaataaatgtgaagccattttaatgatctgttttttttttttatgaaaacctacacagaattagttgccattataaaatgacacatcagtctgcttaaaatttagttctatgcatacacataagccatcagt

SEQ ID NO: 96029 - DNA, 600 bp, Chicken  19866894878728_1
gagatcactacagagacttcctacctgccccttccttgtggccttccttgctggaggagggggccaggctgggctgtgcctcatgcctcccagcctaaagccagaagggcacccatggcttcccatcacacactcattaagcatcttctctactaatggttgtctccattaggaaataccaaccaaagcttctggcagaccccacagctcctgagaagcagcagggaagatgctggtgggaggcagcaacaggctttggttgggccccggtctccaatgtcgcgtcagcccaccatgagraggacggaattaagagctggagaccctgctttaattaaattcaaaagtgcccataaattccactcattttttcattaacatgtaggatcaggaaatcatgctttcagctctcaggctttaataaggagcccagcacagtctgtctcccgtaactttttgatggctaagtctattaacgggtgagaaattacttaatttgcctcttctgttttatctgacacgaagcagtttcacagctccggttcctcgattcaggaaaatgtgtttaattttcatcagacatcgatgtgatttgtggtc

SEQ ID NO: 96030 - DNA, 527 bp, Chicken  19866894878855_1
tggaacagggcatcatgtgatggaaatgcctcctgctttacgagcagccccttctcaccttctcagtgttgattccaggtgaaatgtctgccatttgcttggaagtgagagctgttgatttcactgtgcatcgctttggctgcatcctctgtgtgcgacttccctcctggggtggaagtgggtggtctgtaggcagtgggaaacctcctgggaggctgcaggccaagatttctgctggctgttttatttcttcagatacaatttgggatatgttggtagaacttggattttgagttaacygtgcagtgcctggtgtcttaaaagcttacctagctcaggaagttcagattattttgctgttctcttccttgatgcaggaggaaaaggccaaagcgtacaagaaggagaagcagagagaaaagaaaaggagggcagaggaagatttgacttttgaagaggatgatgaaatggcagctgtgatgggcttttctggtttcggctcaaccaaaaagaatcactgagaagct

SEQ ID NO: 96031 - DNA, 600 bp, Chicken  19866894878911_1
ctgatacagcctttacttttcatgtgtattatctgagcaatctctaacatattagatctctggtttcaaatagcatgtttgagaattacaattattaaatctctaattacataatcaagaaagaagatttcagcagatctttaaaaacatgttgatctaattcatcttggccttgttttatgacatacagccatgcaatgattttaatgatctatttgctatattagcacagtcacataaaagtctgtgatctgatgtatgacagaaagaagggtgatctgtctccctgccagtagatayacattattgaaaaactattatcctcttctaygaatgtgctgctaatagagttaatgttcgcaaccacaaagtaaccagcattagcctccatttaaataattattacatttacacacatcctttttgtcaagcaattatccatcagctgaaatcagatttttatctcttttgatgttgcttttatatgwaaagcttatacatttaaaaagcaagcaagagagaaaatgacgtggtggaaagacagaatgtggacttgttaacaatattgctttatgttaagaatgagttataaatgaggtt

SEQ ID NO: 96032 - DNA, 600 bp, Chicken  19866894878911_2
tctgagcaatctctaacatattagatctctggtttcaaatagcatgtttgagaattacaattattaaatctctaattacataatcaagaaagaagatttcagcagatctttaaaaacatgttgatctaattcatcttggccttgttttatgacatacagccatgcaatgattttaatgatctatttgctatattagcacagtcacataaaagtctgtgatctgatgtatgacagaaagaagggtgatctgtctccctgccagtagatayacattattgaaaaactattatcctcttctaygaatgtgctgctaatagagttaatgttcgcaaccacaaagtaaccagcattagcctccatttaaataattattacatttacacacatcctttttgtcaagcaattatccatcagctgaaatcagatttttatctcttttgatgttgcttttatatgwaaagcttatacatttaaaaagcaagcaagagagaaaatgacgtggtggaaagacagaatgtggacttgttaacaatattgctttatgttaagaatgagttataaatgaggttaaaaaaaagcaaaacaaaaacacaactagcc

SEQ ID NO: 96033 - DNA, 600 bp, Chicken  19866894878911_3
agccatgcaatgattttaatgatctatttgctatattagcacagtcacataaaagtctgtgatctgatgtatgacagaaagaagggtgatctgtctccctgccagtagatayacattattgaaaaactattatcctcttctaygaatgtgctgctaatagagttaatgttcgcaaccacaaagtaaccagcattagcctccatttaaataattattacatttacacacatcctttttgtcaagcaattatccatcagctgaaatcagatttttatctcttttgatgttgcttttatatgwaaagcttatacatttaaaaagcaagcaagagagaaaatgacgtggtggaaagacagaatgtggacttgttaacaatattgctttatgttaagaatgagttataaatgaggttaaaaaaaagcaaaacaaaaacacaactagcccagattttcatttgcagttattgtattgcaggtgtaaaattgtgagactgagtgttatgtaataaatgcacagtcttctttttgtaagtgatcaacaggtttccttgaatcttcattgtcacagtgcccgcagataacattgggatcacgttcaatt

SEQ ID NO: 96034 - DNA, 599 bp, Chicken  19866894879026_1
  misc_feature (1)..(184): n is any nucleotide
nnnnnnnnnnnnnnnnnnnnnnnnnnnnnnnnnnnnnnnnnnnnnnnnnnnnnnnnnnnnnnnnnnnnnnnnnnnnnnnnnnnnnnnnnnnnnnnnnnnnnnnnnnnnnnnnnnnnnnnnnnnnnnnnnnnnnnnnnnnnnnnnnnnnnnnnnnnnnnnnnnnnnnnnnnnnnnnnnnnnnnnnaaaagacggtgctttttcagcatgaatgctaaatgcctctgctctttgccagctagactacctctagctcacagcctccagccactctctggccagatgctcttgtcctctttccygatgcatcagtgttgttttagttttgkgctttgctcctgcctgcactggggatgttaagggaaagtccaacttctgtcaccatgaccttgaggtcagtgttcatccttgcctgtggaccgaccccgggatcctgtgtggccatctgccttgttgtctggctgtgcagatcctgcaggcaggctgcggtgctgggagccgcagtkgggccctgtgggaaggcagccatgcaggctgctcacagcgaaggcatgagtcagcgctgcttaaggcagtcagctttcttgctgtgtgcatcaca

SEQ ID NO: 96035 - DNA, 599 bp, Chicken  19866894879026_2
  misc_feature (1)..(157): n is any nucleotide
nnnnnnnnnnnnnnnnnnnnnnnnnnnnnnnnnnnnnnnnnnnnnnnnnnnnnnnnnnnnnnnnnnnnnnnnnnnnnnnnnnnnnnnnnnnnnnnnnnnnnnnnnnnnnnnnnnnnnnnnnnnnnnnnnnnnnnnnnnnnnnnnnnnnnnnnnnnnnaaaagacggtgctttttcagcatgaatgctaaatgcctctgctctttgccagctagactacctctagctcacagcctccagccactctctggccagatgctcttgtcctctttccygatgcatcagtgttgttttagttttgkgctttgctcctgcctgcactggggatgttaagggaaagtccaacttctgtcaccatgaccttgaggtcagtgttcatccttgcctgtggaccgaccccgggatcctgtgtggccatctgccttgttgtctggctgtgcagatcctgcaggcaggctgcggtgctgggagccgcagtkgggccctgtgggaaggcagccatgcaggctgctcacagcgaaggcatgagtcagcgctgcttaaggcagtcagctttcttgctgtgtgcatcacaatttgaagtgtttgttcttcattttat

SEQ ID NO: 96036 - DNA, 600 bp, Chicken  19866894879026_3
catgaatgctaaatgcctctgctctttgccagctagactacctctagctcacagcctccagccactctctggccagatgctcttgtcctctttccygatgcatcagtgttgttttagttttgkgctttgctcctgcctgcactggggatgttaagggaaagtccaacttctgtcaccatgaccttgaggtcagtgttcatccttgcctgtggaccgaccccgggatcctgtgtggccatctgccttgttgtctggctgtgcagatcctgcaggcaggctgcggtgctgggagccgcagtkgggccctgtgggaaggcagccatgcaggctgctcacagcgaaggcatgagtcagcgctgcttaaggcagtcagctttcttgctgtgtgcatcacaatttgaagtgtttgttcttcattttattttggtagagttcagctttagtagtgagtcatgaagtgttgccagtattcccatacgggatggcttggaaggagtgggaacgtgagcatcatggtgcgatctcagtagtgctcgttgcagtgaagctcttcgccaccacctctcaagtgcatggtttctccatcaccttaagttaacc

SEQ ID NO: 96037 - DNA, 562 bp, Chicken  19866894879055_1
tgactgcattggaagaaaaaaatttttttctaacagcatcatcttcaaactgatggattgtcagagcaaagtgtgatggctgtatgccagaaataggaagctgtaggatgaaagctaaagggaagcttattttgttccttactactgtcaggatacccgtggagccacaaacaagctgaacacccacgcccgtgtggaatatccaaaaagcagagttgaacattttgcatcaaatttaatcccccatagcgcagactgctcatgattaaataggatggtttcagcgtgctgcaagtcacygctttcacaggaagctgatagatacagcccagataaggcgaagaaattaaacccccaggaaacatgatgtgctgtggactggagcagccccaagccttgtccatgagtcatgggatgtgcttcccaccgtttctctccccttgatgtgagttaggggcgacctgctgggctgtacgagctgagcacctcccctgggctgaagtgctgggagacatacccaggctggcactcaggccacaggtgtgctgagctgccggcgctg

SEQ ID NO: 96038 - DNA, 485 bp, Chicken  19866894879231_1
ccataaataacttccatggtggtggccagcttgaagtgaatcactagtctctggaaggaggtcttagggaaaaatacgcccttaaacctgcctctacatcacctcagtgctgagcagcagagccccgctccctggagcgcaggcaccagaaaagggacctgtttctacaggagactccctaacaaacacagctctgcatacacaggtggaataaatctgttatggccttcctcccacctcatctataccatctcatactgctgtttccatgggcctttctgcatcctcaagatcatgcgycagatatttcagctactcatctttcctctgtccttgattgcttttcaaactctttggagcacagtgatttaaactactcgcctttcaacttgctcttcattttggcttgactcagctttcataaaaatatttttaaaatagtactaatggaatgcaatcgatttggtgttaaactgttaaaaata

SEQ ID NO: 96039 - DNA, 599 bp, Chicken  19866894879385_1
  misc_feature (1)..(99): n is any nucleotide
nnnnnnnnnnnnnnnnnnnnnnnnnnnnnnnnnnnnnnnnnnnnnnnnnnnnnnnnnnnnnnnnnnnnnnnnnnnnnnnnnnnnnnnnnnnnnnnnnnnttctttttggattctgctatgttcaacctatatcacatcatatgctgggtataatcacatttactaattatctagaaaaaggtgtcatcaaaataaacaaggagtaacaggctctttccatgatacacaacgtgacattgttccatgatactgcaactatcttcctctgttagctaggttcccagaacacacaacgtatakatttgttcaagacaggaaaatatgccactgtgcaccaattttgcgactatttctagaagaaaagtaagcaaataaatattttaagaggggttttgatgcattgcaatttccctgatgtggttgtaggcagaaacatctgcatttcttatagtcaatacacaaactaatatgaagagtagacggtacagctagacctgagatacactttgttaagcactttacatgtcagataaaatatgatttsagatatcaaatgagacagaagagctcaaaggagattcccacatgaattgagaaga

SEQ ID NO: 96040 - DNA, 409 bp, Chicken  19866894879385_2
ttctttttggattctgctatgttcaacctatatcacatcatatgctgggtataatcacatttactaattatctagaaaaaggtgtcatcaaaataaacaaggagtaacaggctctttccatgatacacaacgtgacattgttccatgatactgcaactatcttcctctgttagctaggttcccagaacacacaacgtatakatttgttcaagacaggaaaatatgccactgtgcaccaattttgcgactatttctagaagaaaagtaagcaaataaatattttaagaggggttttgatgsagatatcaaatgagacagaagagctcaaaggagattcccacatgaattgagaagagtaaacagatggaccctgggagcctgacatatgaatagcccatttattgcctta

SEQ ID NO: 96041 - DNA, 600 bp, Chicken  19866894879406_1
ccccctgctccgctcccctcatgacacccctcatcccttctctacttcctctcccctctccccatttttcctgttccctttctcctctccccatttcctctttcccctttccttatttcccctttcgtcctctccccacttcccttctccccactcccctctccctgttctcacaggagcgcagcgcagacctggccccatccatcagcgcagccgcagtcccagcatggggagaccctcagcactgcactcagccccatgccgaccccagctgtacatgtgtcactgcccagaggggtycatcacctcccaagggggtgcctgtcatcacccagaggggtccctgtcacctcccaggggggtccttgtcaccacaccaccccttccgtgcccctgcaccccaggctgttgccatccctctgctttgtgccaccccagcacgtggtgtcacggctctctttcccctctctcctttctctgctgctctccgggtgctgctggggcagtccgtgctgcagcattaccagctgagcagccgatggagccctgcacctccgcttgtgtccccatagcacaaccacggccgctcgacgtgtccct

SEQ ID NO: 96042 - DNA, 599 bp, Chicken  19866894879635_1
  misc_feature (1)..(48): n is any nucleotide
nnnnnnnnnnnnnnnnnnnnnnnnnnnnnnnnnnnnnnnnnnnnnnnncaattcattgtttccacttccccaacattataataattcttcactttaaattatcagtaataaatatcacttagctcttttactagatttttgaaaacacggggcatagcttgtgaatagaattgtcacattctcactatttctctctgagatagataggtagaagacagatttatcactgcagttttcttaccatcctaaatgagtcagtcctagacagaacggcttaacaaagaactacattaaaagacmgtagagtcttctgggatggcacaaccacaaaaacaatgcagcaaacaaaattcctgtttatgttgaaagagtatttctaggaaaatgattttacaatatgtaatcacagagtaggtgaagaaattatgcttttatttgcatggtagtgaagatgataaaataatgttagcaatactgcaattttttaattcctgaaattggcacttctctcctgtaatgtctttttccaaatctctgaacactgtttacagaaatcaaacccattgtactttttttgccttatgtactataaatataca

SEQ ID NO: 96043 - DNA, 600 bp, Chicken  19866894879718_1
atttgtgccttttttcttaacatattctgcctcacccccctaggaatgtgtgtttttaaataagatcctaagggggcattgtgtttgggctcaagtactcaatattctttgaagaggttttccaagagcacacattgcttatatctttgcctgattgcaaaaccctgtagtggtgaatcactctgctagatgaagttcaaaatcatgacctgtataaaatgagaagtatacatgctatggtttagaaagaaaataatgaaattctggttactctgtctggtcctgtaatatgtacttacrtgttttacagatgcatacactgtgacaccatatccactggaataaggatgtatttcagtttcatgctagctggacttcatcgcaggaaaggttggttttcagatcacgacaattttaatggtgaatgaacttgcatggttgtgtaaatacatagccatgtatgtttgtaagtatgcagatgtgtttgtatctgtccaagygcagatttaaacctsagcgaacttcactgatttcaggcatgctggagagtctgagccatttcctgagactctgaacctttttrgagttttcatgttttct

SEQ ID NO: 96044 - DNA, 600 bp, Chicken  19866894879718_2
aatcatgacctgtataaaatgagaagtatacatgctatggtttagaaagaaaataatgaaattctggttactctgtctggtcctgtaatatgtacttacrtgttttacagatgcatacactgtgacaccatatccactggaataaggatgtatttcagtttcatgctagctggacttcatcgcaggaaaggttggttttcagatcacgacaattttaatggtgaatgaacttgcatggttgtgtaaatacatagccatgtatgtttgtaagtatgcagatgtgtttgtatctgtccaagygcagatttaaacctsagcgaacttcactgatttcaggcatgctggagagtctgagccatttcctgagactctgaacctttttrgagttttcatgttttctccatatattaattagtaatatggaaaaagtttgagaaattgtttatgcttgatggaaaaagactatttcctggtaaatatactagctgccacatctactggaaaatgagaatagtgtatttttttaaattgggccaacaaaataaaattttgtgattactagttttagagtctgcatgccttgaatcttagaactgcaca

SEQ ID NO: 96045 - DNA, 600 bp, Chicken  19866894879718_3
aaaatgagaagtatacatgctatggtttagaaagaaaataatgaaattctggttactctgtctggtcctgtaatatgtacttacrtgttttacagatgcatacactgtgacaccatatccactggaataaggatgtatttcagtttcatgctagctggacttcatcgcaggaaaggttggttttcagatcacgacaattttaatggtgaatgaacttgcatggttgtgtaaatacatagccatgtatgtttgtaagtatgcagatgtgtttgtatctgtccaagygcagatttaaacctsagcgaacttcactgatttcaggcatgctggagagtctgagccatttcctgagactctgaacctttttrgagttttcatgttttctccatatattaattagtaatatggaaaaagtttgagaaattgtttatgcttgatggaaaaagactatttcctggtaaatatactagctgccacatctactggaaaatgagaatagtgtatttttttaaattgggccaacaaaataaaattttgtgattactagttttagagtctgcatgccttgaatcttagaactgcacagttttcccataatca

SEQ ID NO: 96046 - DNA, 553 bp, Chicken  19866894879718_4
tgtaatatgtacttacrtgttttacagatgcatacactgtgacaccatatccactggaataaggatgtatttcagtttcatgctagctggacttcatcgcaggaaaggttggttttcagatcacgacaattttaatggtgaatgaacttgcatggttgtgtaaatacatagccatgtatgtttgtaagtatgcagatgtgtttgtatctgtccaagygcagatttaaacctsagcgaacttcactgatttcaggcatgctggagagtctgagccatttcctgagactctgaacctttttrgagttttcatgttttctccatatattaattagtaatatggaaaaagtttgagaaattgtttatgcttgatggaaaaagactatttcctggtaaatatactagctgccacatctactggaaaatgagaatagtgtatttttttaaattgggccaacaaaataaaattttgtgattactagttttagagtctgcatgccttgaatcttagaactgcacagttttcccataatcatagaatcagtgtttccctttt

SEQ ID NO: 96047 - DNA, 600 bp, Chicken  19866894879728_1
acctttccccccatttttacttcctgagaattttgcaagtttctagttttactagcacagtggaactcaagggtttccttctgaactagaaatctaagaatagatttaaagacacagtattaggttcagaagaacatgatatagcactacacattaacattttttcctcttttcccccagcagtaagtatttgtgaaacagcactgaagtagtaagacaatatagtgagtttacacagggaaaaggaaaacgaggcttttagtaatcttctcctttccatattgtctaccgcaaatacayatatatatatatatatgtatgtatatatatatattagttttgtaactcctgtgaacatgtttggaagtttgtctgcagatgrggcacctgaccttttgtgaggcaggaatgtatgcttgaagtctcctgttttttcttgctcttaagttatgaaagtcaccaagataataaacaagtccattcttcacaaaagaatattcttaaaaagaaaaaacaccacaaaaaataaaaaatggaattagaagagtttgaacagtatcttaaagatgaaaaaggccaaaaagttttgaaagtaacaag

SEQ ID NO: 96048 - DNA, 600 bp, Chicken  19866894879728_2
gaactagaaatctaagaatagatttaaagacacagtattaggttcagaagaacatgatatagcactacacattaacattttttcctcttttcccccagcagtaagtatttgtgaaacagcactgaagtagtaagacaatatagtgagtttacacagggaaaaggaaaacgaggcttttagtaatcttctcctttccatattgtctaccgcaaatacayatatatatatatatatgtatgtatatatatatattagttttgtaactcctgtgaacatgtttggaagtttgtctgcagatgrggcacctgaccttttgtgaggcaggaatgtatgcttgaagtctcctgttttttcttgctcttaagttatgaaagtcaccaagataataaacaagtccattcttcacaaaagaatattcttaaaaagaaaaaacaccacaaaaaataaaaaatggaattagaagagtttgaacagtatcttaaagatgaaaaaggccaaaaagttttgaaagtaacaaggagagtaaaagaaaaaagaatttgaacaattaaattatttgataattcatttttaaaaatctgagtttttatgctaaaatat

SEQ ID NO: 96049 - DNA, 546 bp, Chicken  19866894879731_1
tctgttctttgaccgagctggcagatttaaggaggagattaaacagcactgtgtactcaaaactgcacttggtaggaagccgtttttgtcactttttcaatggcttcagttagtcatggatttctaggtgaaataaaggactgttctgctcttggaagcagagctctatcttgaaaagtccatctaaaataaactttgctcacttgattcaggaagccctttctgtgcagcgctgcctctgtgagcagcttttcttttggtagtggtcagggagttctggcatcattttgcaatatgcartgcaggtctctgatgaggtagtaactgaagtcttctgttgctaaagtaacaaatgtctgagtcatgagtgctttatttatgattatgcttacgtcaaaacacatcaggacagcacttgctcactgtactttcccttactgttttaattgtaaagaatggtaaaatgccaagcgctcgatgttgagctttcagcagctttgtctggtttgctgatggtttgtatttagcacccaaacaaaattatta

SEQ ID NO: 96050 - DNA, 599 bp, Chicken  19866894879764_1
  misc_feature (1)..(75): n is any nucleotide
nnnnnnnnnnnnnnnnnnnnnnnnnnnnnnnnnnnnnnnnnnnnnnnnnnnnnnnnnnnnnnnnnnnnnnnnnnnctttccatacagataagcatacacaaaggctgttgtaaagcaattgtgcaatgaaaagcacagcaataagaggagagtggcagagtcctagacttcagcaagtgaggataagcccaaaggcagcagctgctgatacagaaactaagaaaaaagctgcttacctttgaaaggccacaggtagatagggctccccagtaagatacccttgcttccactgccaacccstaaatgaggtctgggaaggaagggatggatcctggctccaccccttctggtcactcaggtgcattgcatgcactgagctcccctgggttggccctaccttcccaccaggtgctcattgtttcaagctgtgacttagcatttctgctacagctgtgttggaatctctgccccagctgcatgaggatgagcttctctgctgcagcctggctggagtggctgtacgggtgctgttggaattctgtgtgatgggctggaggagagccaggcagagctgcaggtactgccagtggctgaagccc

SEQ ID NO: 96051 - DNA, 600 bp, Chicken  19866894879886_1
atctgtgctctcaccataacccttttggataaatatccttaattggagtggcaacaccaagattcttctgaaatcagcacaagtgcattagaaataacttgcagcaagaacacatcagccaactgtaaagtgctgtgtagaactgtaatgccatttttttttatggtggtataaagctccatatgaagaagatttccagcacacttgatgacagcgagttgagaattgcatttccatggagctaaatgaattgagagtgcagagagctgtgtacagaagttcatatagtgatgggatttyggggagagtagtgttttagggtggatgttgtaccccttctttattctgggttttatctggactcagaagtttcagctgttcttcatgctgctgaatgccctggcaggaggaggtggctttgatctctgttaataatgcagcgtaatggcagaattcagtcaacaagggtcaaaccacagggtcctcttcttaacattaattctttgtaaatcctcactgagcctatcaggcactcatagacacaatgcaccattatgagccmtgtacattactgaagatctgtcagagacagcctgccct

SEQ ID NO: 96052 - DNA, 600 bp, Chicken  19866894879886_2
agagctgtgtacagaagttcatatagtgatgggatttyggggagagtagtgttttagggtggatgttgtaccccttctttattctgggttttatctggactcagaagtttcagctgttcttcatgctgctgaatgccctggcaggaggaggtggctttgatctctgttaataatgcagcgtaatggcagaattcagtcaacaagggtcaaaccacagggtcctcttcttaacattaattctttgtaaatcctcactgagcctatcaggcactcatagacacaatgcaccattatgagccmtgtacattactgaagatctgtcagagacagcctgccctaacgaagcagctgaagttctccttccactcctgtcatttcaattaacattagcagaaataatcttaatgaactcaactattaatctttcctagctggccccagactccttgctattaatcagctccatattcatagttagttaccattcctggtgcatcagacggagatgacttctctccttctccataggaatagaggtcaagtcctgcaagcccttgggcaaacagacccattcctatctacgagcccgttatcttccca

SEQ ID NO: 96053 - DNA, 600 bp, Chicken  19866894879923_1
ctatagctgtgctgaaatgactaaacttggatcctaaagcttttaaagttgcatttagatgtgatttacagtggctcattaaaaatagatcttcatatgtcatctcattaaaatgaatgggagcaatgatgttatacaggaggacagcttgtggcccatagcgtatttctctgagagttgctaaagctaaattagtctgctttcctcttctgttctcccactcactgtaacaaagagcacagctctgtttgggaggtccctgtccctgcaggtaggagcaggctgctgtcaggaccatcytgggtcctttccagctgtccccagccagggagcctctgccctgatgtgaggctgttcctgctaatgcttttttggaagtgcaataatggtagccattgcactgggaccaagaaatgtacgaagagttaaggctattaaaagaggaaaagctgcttttgtgagtagtgttactttatctttttggcttttcyttccccgaataaagtccacacaggtatttatccaagtactctgtagaaagataattatttatgttctactagaataatcctttaagatatgaagattatcatagaattg

SEQ ID NO: 96054 - DNA, 488 bp, Chicken  19866894879923_2
ttagtctgctttcctcttctgttctcccactcactgtaacaaagagcacagctctgtttgggaggtccctgtccctgcaggtaggagcaggctgctgtcaggaccatcytgggtcctttccagctgtccccagccagggagcctctgccctgatgtgaggctgttcctgctaatgcttttttggaagtgcaataatggtagccattgcactgggaccaagaaatgtacgaagagttaaggctattaaaagaggaaaagctgcttttgtgagtagtgttactttatctttttggcttttcyttccccgaataaagtccacacaggtatttatccaagtactctgtagaaagataattatttatgttctactagaataatcctttaagatatgaagattatcatagaattgcaggggttgaaagggacctcgagatcatcaagtccatctcctctgcagaagcaggtgccctacgacagattacacagat

SEQ ID NO: 96055 - DNA, 600 bp, Chicken  19866894879930_1
ttacaaatactaaatatcacaacatagcaaagagctctgtgctaagatgacaaagccagcatgcgctgaaccagctgcaagtgtagtcctaaactctacaccctgactgacaacagtgctagaataaaacaacctgaatagcaatttcatggtattttcagcactctgaagcaaccctaaagtaacatttcactaccacaacacctgaaatctactctagcacagactgcttttatcctttcagacatctgtcctagcagaaacaaatcatagaatggcctgggttgaaaaggaccacartgctcatgcagttccaaccccctgctatgtgcagggtcgccaaccagcagcccagsctgcccagagccacatccagcctggccttaaatgcctccagggatggggcatccacagcctccttgggcaacctgttccaatgactccttaacacatccaattacttcaaagttgtgcaaaacacttttctttatggtgtcagaaaaggaataaactatcaataacttctcccatgtatactatcaaagggtgttctgaactctttgctcaaaatacactgtgtactattttttactttaacat

SEQ ID NO: 96056 - DNA, 600 bp, Chicken  19866894879930_2
actaaatatcacaacatagcaaagagctctgtgctaagatgacaaagccagcatgcgctgaaccagctgcaagtgtagtcctaaactctacaccctgactgacaacagtgctagaataaaacaacctgaatagcaatttcatggtattttcagcactctgaagcaaccctaaagtaacatttcactaccacaacacctgaaatctactctagcacagactgcttttatcctttcagacatctgtcctagcagaaacaaatcatagaatggcctgggttgaaaaggaccacartgctcatrcagttccaaccccctgctatgtgcagggtcgccaaccagcagcccagsctgcccagagccacatccagcctggccttaaatgcctccagggatggggcatccacagcctccttgggcaacctgttccaatgactccttaacacatccaattacttcaaagttgtgcaaaacacttttctttatggtgtcagaaaaggaataaactatcaataacttctcccatgtatactatcaaagggtgttctgaactctttgctcaaaatacactgtgtactattttttactttaacatgcataaaa

SEQ ID NO: 96057 - DNA, 600 bp, Chicken  19866894879930_3
cagcatgcgctgaaccagctgcaagtgtagtcctaaactctacaccctgactgacaacagtgctagaataaaacaacctgaatagcaatttcatggtattttcagcactctgaagcaaccctaaagtaacatttcactaccacaacacctgaaatctactctagcacagactgcttttatcctttcagacatctgtcctagcagaaacaaatcatagaatggcctgggttgaaaaggaccacartgctcatgcagttccaaccccctgctatgtgcagggtcgccaaccagcagcccagsctgcccagagccacatccagcctggccttaaatgcctccagggatggggcatccacagcctccttgggcaacctgttccaatgactccttaacacatccaattacttcaaagttgtgcaaaacacttttctttatggtgtcagaaaaggaataaactatcaataacttctcccatgtatactatcaaagggtgttctgaactctttgctcaaaatacactgtgtactattttttactttaacatgcataaaaagtcaacaaaaattagtctgacagcaattatttacttggatgtgttac

SEQ ID NO: 96058 - DNA, 600 bp, Chicken  19866894879950_1
gggaattttacacactaaacataaactacctttgccttcgtctccttgagaggaatgggctgtaaggacagcacgaggcgacacagcagctgcaacgctctgagaataattaaaaatatctgcaaaagataaaataaaccaggttcaaactttggtttttttaaggtatacaaaaaaaaaaaaccttgaaactctttcacatcctgggctctgtcagaaaccattttcattcctgtcttttatccagtgctgtagacactgacacagatgtgtagcccagctgctattgcatcaaagcamtgtagtcttccctggctcttatttwtgttaaagcaatgacagaggtcctgctgttaactcatagaagaaccaccaaagcctaaagaggctagatgactcaccctgatgggagaagtagttctatgcactatgcaaagccatccacagaacaagataaaccatgcagtggtaccaacaagtagtagaggtttcagttagtacagttcaaactgaagaatttaatcacaggattccagataaaaatacgaaaaaaaagaaaaaaaacagggaatcacctaactcaccaacctgcttctccaa

SEQ ID NO: 96059 - DNA, 600 bp, Chicken  19866894879950_2
ctacctttgccttcgtctccttgagaggaatgggctgtaaggacagcacgaggcgacacagcagctgcaacgctctgagaataattaaaaatatctgcaaaagataaaataaaccaggttcaaactttggtttttttaaggtatacaaaaaaaaaaaaccttgaaactctttcacatcctgggctctgtcagaaaccattttcattcctgtcttttatccagtgctgtagacactgacacagatgtgtagcccagctgctattgcatcaaagcamtgtagtcttccctggctcttatttwtgttaaagcaatgacagaggtcctgctgttaactcatagaagaaccaccaaagcctaaagaggctagatgactcaccctgatgggagaagtagttctatgcactatgcaaagccatccacagaacaagataaaccatgcagtggtaccaacaagtagtagaggtttcagttagtacagttcaaactgaagaatttaatcacaggattccagataaaaatacgaaaaaaaagaaaaaaaacagggaatcacctaactcaccaacctgcttctccaaactgatcccttaaacaccactttgt

SEQ ID NO: 96060 - DNA, 600 bp, Chicken  19866894879991_1
aaaaggatggagaaacaccagccaggagggtggttggccagggccaccacagctctgcgagaagagtgtgattcaacttttctggaactaaatcagcacccagctttgtaaaggggacaacttcaagtgaagccgatttcagtgacagcagatctgtaactgcaaaatttggactcatggggactgaagtctcaggggttgctatggactctccttcaccccaaaggcaaatgccaaaaatattaaaaaagagcagatatggaagttaaaaagaaaacgttcttctgaaacatctcagcrtcagtttcggatcatcagtatcacaaaccaacttccagagcagcttgctgataatctccctggttatctccaccaacacacgtgtgatgtggcacgtcatctccatgcctgccagcactacaagctctgaacatgaccctggctcccttccccaagccctgagaaactcaataattgttttatttggctctccccttgtcctctcttcacaaaatcagcacgctgccacagcgttgatctggaattatttactgttgctgaagctcagacagaaaccacaggccaccttggctcatccca

SEQ ID NO: 96061 - DNA, 600 bp, Chicken  19866894879991_2
ctccccttgtcctctcttcacaaaatcagcacgctgccacagcgttgatctggaattatttactgttgctgaagctcagacagaaaccacaggccaccttggctcatcccaagtgggacgggcttgctgtgtgttcccccaggacagaggatgcccaggcaggactcaccaggagctcggaaactctgccaaacactgaaaactactttgtccacgttttctgaacattcagtagacaccatctgcttaagattaccctcattaaagctaacatgggaacataatcagccatggcttctyttctctgcttttgtaaaggagcgtcacttgcaagactatggtactatttcctttgagaccccctgaggacaagaaaatgaaaccatgacagaactgcaaggtacttcccaacaagcgttctccttcatgccaacacaatgctcagctcagggacagggcagtcctaagaacaagtcctccaaatcacttctacatctggcaaaccaccccactgaggccagcctgttcccaagcagctgcatctggctcccaacacaaggttgtgcatatcattgtacacatgcccactgcatgccccgg

SEQ ID NO: 96062 - DNA, 600 bp, Chicken  19866894880006_1
cagctgctactaacagtgttttcaacattctgaatacacatttaagtaactctgacaagaaaaatatggtatcaattgagggggaaaaattgtgatcgtaaagtacattgtaggctttttttttctgtacaagacttccttgccaagtgaatcaataaatcagatggtagaaactctgctctacgttccaacaaaactcaaatgatgaaattaatacatctgctttttgtgtagcaaatactttgctgaagtaagccatacttgctgcacagtccttgagatatcctcacatgtgcataktkgattattttttttttaaactttggagctcttttcaaaaattctgagttacttgccttgtagtaccagtcctgaaattttttacagcactcttcactgcagaaatctctcactacaccatcaagttccttagttgctccctttttgcacagctgtgagcagtaattacaagtaacacatctcagtcctaaccgtcttgcaaagtcttgtttatatagcagcttgcagcctggaaacagattttaaacattaggaacaaagtaatttttacagagagatatcacagttaagagttaaata

SEQ ID NO: 96063 - DNA, 600 bp, Chicken  19866894880006_2
gctgctactaacagtgttttcaacattctgaatacacatttaagtaactctgacaagaaaaatatggtatcaattgagggggaaaaattgtgatcgtaaagtacattgtaggctttttttttctgtacaagacttccttgccaagtgaatcaataaatcagatggtagaaactctgctctacgttccaacaaaactcaaatgatgaaattaatacatctgctttttgtgtagcaaatactttgctgaagtaagccatacttgctgcacagtccttgagatatcctcacatgtgcataktkgattattttttttttaaactttggagctcttttcaaaaattctgagttacttgccttgtagtaccagtcctgaaattttttacagcactcttcactgcagaaatctctcactacaccatcaagttccttagttgctccctttttgcacagctgtgagcagtaattacaagtaacacatctcagtcctaaccgtcttgcaaagtcttgtttatatagcagcttgcagcctggaaacagattttaaacattaggaacaaagtaatttttacagagagatatcacagttaagagttaaatatt

SEQ ID NO: 96064 - DNA, 599 bp, Chicken  19866894880017_1
  misc_feature (1)..(130): n is any nucleotide
nnnnnnnnnnnnnnnnnnnnnnnnnnnnnnnnnnnnnnnnnnnnnnnnnnnnnnnnnnnnnnnnnnnnnnnnnnnnnnnnnnnnnnnnnnnnnnnnnnnnnnnnnnnnnnnnnnnnnnnnnnnnnnnnnntagaacaaatcacatgtagtttgttatgcttaggctactcagttgtttttagtgccagtgtaagaacatcagacactacagttttagtgtgacattaccagttgttcccttacagttttgtttcaaagcacaccataacccaattccttttaaacagactccatgccaasagctggcttgcaccactgattaacagatgagcatctattaagcatgtgaagaggaaaataaggtgatcagagcaaaactaagttactagtgctaccttttgcacctacagaggatttactactgcttaagcccatggggcaattctggtcccagctcaggacatgccttctgtttatcagcagtgctgtaaagcagcttttgtttaacttaggctcccccaaaggagcctagagaagtgaaagtcatcatatgacagttatcatactaccaggctccagctacagcagaagcaaagtac

SEQ ID NO: 96065 - DNA, 600 bp, Chicken  19866894880168_1
gcttttgttggacaaacaactggctggacaaggaattagctggatggtcacactcagagatctgtggtcaattacatgaagttcaaccatgacataggtgaagttgtgcagctgtgtcgggacaatccctagatcaaatataggcaggacagagagcagcttgagagcagcttgaaccctgagagaatgttttgggggtgttgccttgatgaaagactcaacctgagcaacaatgtgctcttgcagcccagaaggccgaatttatcctgggttgcctcgtgaaaagtgtgccgagattgytgagagtggtgattctgctcctctacttgcactctttagaccccacctggagttctgtgcccagctgtcgtgcctgctacacaagaaggacatggagctgttggagcaggtctggaggggggccacagagatgatgagagggttggagcacctcttctctgaggacaggctgagagagctgggggacttcagcttggaaaagaggaggaccttatagtggctttccagtacctgaaggggcctatagtaaattcggaaagagacttttataagggtatgtagcaacagaatgagagacaa

SEQ ID NO: 96066 - DNA, 599 bp, Chicken  19866894880174_1
  misc_feature (1)..(230): n is any nucleotide
nnnnnnnnnnnnnnnnnnnnnnnnnnnnnnnnnnnnnnnnnnnnnnnnnnnnnnnnnnnnnnnnnnnnnnnnnnnnnnnnnnnnnnnnnnnnnnnnnnnnnnnnnnnnnnnnnnnnnnnnnnnnnnnnnnnnnnnnnnnnnnnnnnnnnnnnnnnnnnnnnnnnnnnnnnnnnnnnnnnnnnnnnnnnnnnnnnnnnnnnnnnnnnnnnnnnnnnnnnnnnnnnnnnnnnaaatttccttacagtttagcattaatagcatcaggtagggcctgaacaggattcaattcttagctgcaarttcacattatagttccacacacattcaatgaaaaagcagactggcatgtttctgttgcagatgtgtctgcaaggtgatcactatggcttgaatccaaagcttgttccaccttttctacctgtacttgatatgaatagcaagttaggctcagctcatacattagatcaaattcaagcatctacagattgctgctggaaggcagctgggcaggtgagatggagcgtggtatttaaatgctcggctgccttctcttgttcgcttcacgcttcaagcagttttacttctgccctcccaagggg

SEQ ID NO: 96067 - DNA, 517 bp, Chicken  19866894880402_1
taaaacatcccattaagggaaagtctgaggttcatttctttaactccttgtccaactaagcagagctagaagttcaggtgctataatgttacatggcaactcctgcctctgccacctgaactgtttgagacaaagacgaacccaaacccaacatgacattgacactttcacaagagcatgcaagcaatacgactggcatttcctcaactctgctgcaggagctgcacaaacccaacagggtcttctctgccctgtgctccagtgactgccctctggaaccccctggctcccgctgaccckgcagcagcgacgccagtgttacaacaacaccaggcaaggagcacccatctgcatgctcagycccagcacagcctgctgcctaagccaatttagcctcaagaacacaatatttactagtcactgagtttcaaagcctattaattggtgccttcccacagtctttgtgaatcaacatatccattcatttcagtcccctcttctgccagctgcaaagaga

SEQ ID NO: 96068 - DNA, 456 bp, Chicken  19866894880402_2
agagctagaagttcaggtgctataatgttacatggcaactcctgcctctgccacctgaactgtttgagacaaagacgaacccaaacccaacatgacattgacactttcacaagagcatgcaagcaatacgactggcatttcctcaactctgctgcaggagctgcacaaacccaacagggtcttctctgccctgtgctccagtgactgccctctggaaccccctggctcccgctgaccckgcagcagcgacgccagtgttacaacaacaccaggcaaggagcacccatctgcatgctcagycccagcacagcctgctgcctaagccaatttagcctcaagaacacaatatttactagtcactgagtttcaaagcctattaattggtgccttcccacagtctttgtgaatcaacatatccattcatttcagtcccctcttctgccagctgcaaagaga

SEQ ID NO: 96069 - DNA, 599 bp, Chicken  19866894880440_1
  misc_feature (1)..(133): n is any nucleotide
nnnnnnnnnnnnnnnnnnnnnnnnnnnnnnnnnnnnnnnnnnnnnnnnnnnnnnnnnnnnnnnnnnnnnnnnnnnnnnnnnnnnnnnnnnnnnnnnnnnnnnnnnnnnnnnnnnnnnnnnnnnnnnnnnnnnncagagttggggaagttgttcctacacttattcagcagttgtgagacacagtagaaggaccaggtcctcattaggactcaccacaaaaacaaagacatctttagcaagctacagaaaacgtccagaaaacccaggtgagcaagaggacagagcacaggacatatgagragaggctgacacagctggcttgagtcactctggagaagaaaaggtggcacattctgctttcttcagctaccttttaggattctctacagccaggctcttctcctagctccacactgagatcacaagaggaagtcatcccatgtttcactatgtgcagttctcrtttgagaaaggaaaacaagattagaccatcagggtggctcccagatagaaatggggatcctgggaaagctctgcagtccctctatttggagcctatatggttacttaccatgctccaacagcttcagctgccaact

SEQ ID NO: 96070 - DNA, 600 bp, Chicken  19866894880440_2
tcagcagttgtgagacacagtagaaggaccaggtcctcattaggactcaccacaaaaacaaagacatctttagcaagctacagaaaacgtccagaaaacccaggtgagcaagaggacagagcacaggacatatgagragaggctgacacagctggcttgagtcactctggagaagaaaaggtggcacattctgctttcttcagctaccttttaggattctctacagccaggctcttctcctagctccacactgagatcacaagaggaagtcatcccatgtttcactatgtgcagttctcrtttgagaaaggaaaacaagattagaccatcagggtggctcccagatagaaatggggatcctgggaaagctctgcagtccctctatttggagcctatatggttacttaccatgctccaacagcttcagctgccaactgcctgttcagcccagactggagtgcagccttggaccacatgccatccagagctcgtgcctcaaattatctggcaccccaggaaatatcaatggtcctcacatggatacagggagataagagtgacatgagagacaacatacaattccataaaatgagagtgaga

SEQ ID NO: 96071 - DNA, 600 bp, Chicken  19866894880479_1
agttttcaaatgaccaggtgtctttttttattgtcctttcctgtacagatggataataggtctctgcagctcgttctccgtgtgtcagttccagggtcaggttaccacagtgtgataagaactatgtatcccaaccactgctatttttcaatatctaagaatattcctcttgagaacttaaaaatgatttttgttaattttagcaagtaggtaagaactatgggcaggtctcgacttatttaacagaacaaccaccatttaacaaaacaaccaccacctccaagaaaccccacctccccraaccagtttgctgaactctgcataaaagaactgatrttggctttgtacamattgcaatgtattaggttctgtcgacaaagagataaaccttactgagtaagtttatctcaaggtttaacctactgatcatgtaggccaggaaagcccacaagctcttcattcattgcacaataacctgatgccatcctgtgctcttgcacgccttggcaagtgttagcagggatgctatgaggagtttgttgctttgggtcacgtacatctgtgtcacttctctgcttttaagaaagaccaagacccatg

SEQ ID NO: 96072 - DNA, 600 bp, Chicken  19866894880479_2
tttcctgtacagatggataataggtctctgcagctcgttctccgtgtgtcagttccagggtcaggttaccacagtgtgataagaactatgtatcccaaccactgctatttttcaatatctaagaatattcctcttgagaacttaaaaatgatttttgttaattttagcaagtaggtaagaactatgggcaggtctcgacttatttaacagaacaaccaccatttaacaaaacaaccaccacctccaagaaaccccacctccccraaccagtttgctgaactctgcataaaagaactgatrttggctttgtacamattgcaatgtattaggttctgtcgacaaagagataaaccttactgagtaagtttatctcaaggtttaacctactgatcatgtaggccaggaaagcccacaagctcttcattcattgcacaataacctgatgccatcctgtgctcttgcacgccttggcaagtgttagcagggatgctatgaggagtttgttgctttgggtcacgtacatctgtgtcacttctctgcttttaagaaagaccaagacccatgcagtccaaattacttgaatattgttggtggctttac

SEQ ID NO: 96073 - DNA, 600 bp, Chicken  19866894880479_3
ggataataggtctctgcagctcgttctccgtgtgtcagttccagggtcaggttaccacagtgtgataagaactatgtatcccaaccactgctatttttcaatatctaagaatattcctcttgagaacttaaaaatgatttttgttaattttagcaagtaggtaagaactatgggcaggtctcgacttatttaacagaacaaccaccatttaacaaaacaaccaccacctccaagaaaccccacctccccraaccagtttgctgaactctgcataaaagaactgatrttggctttgtacamattgcaatgtattaggttctgtcgacaaagagataaaccttactgagtaagtttatctcaaggtttaacctactgatcatgtaggccaggaaagcccacaagctcttcattcattgcacaataacctgatgccatcctgtgctcttgcacgccttggcaagtgttagcagggatgctatgaggagtttgttgctttgggtcacgtacatctgtgtcacttctctgcttttaagaaagaccaagacccatgcagtccaaattacttgaatattgttggtggctttacagtctaaagggcat

SEQ ID NO: 96074 - DNA, 600 bp, Chicken  19866894880482_1
ggcagccggggttagggctgggaggaccacgtgacgccgggctgcacgagccccctgctcgccctcctgaggtagagccattcagggagagcaaggctgagcgcggccgcgcagcccctccctcccttcagcccggttgactaacgttctttgtctggtgacctttccgcggcgaagtcatgtgtgtaattgaggattaaacggtaaaatgcagtctttttgcaggatggctttgcagggccgtcccccactcccacagaaggagttcgttttccactgagtccctctcagacgtctctycacagacaccttccatcccataatgcacgatgacgttcggaggtgcccacgttctactcattgctcattagacgttgggctggtgctcacactggtgagaaacaagcgcaaatgggagaacagcgtggtgctccactgcacccagtgctcactccctgtgcccatgctgcttgctcaacacctaacccatctctgtagcacacagcagatgagatgaggtgataagatggctcttctgtggtaaaatggagcaaataaaaaacatcccgaagccacccactgttacaatacgaacacacg

SEQ ID NO: 96075 - DNA, 600 bp, Chicken  19866894880597_1
aatttttatttttatatttttaattaactgaagatgttgacagtcactgtacaatctggaaaagacactatccaattctgcatccctgtgagtctctgactcttgtggcgtctatagcttggaaagtacagtgtttaaaatctgggttcttgatatcagcacagtgatttagagacctctgccaaagttacctagatatgggggaaacaggtaattcaagtggctgatttgcagtgggtggaagcatcagcacaggccttgcatagcacagtcaaataccaaacaatatggaaatgtgcstccactgtctgtccaagaaatcccatctggagctgcacataaatgcctcacgatttgctgactgtggacttctgaggggagctgacagcaagcattataccactgtcagatgtaaaaatgaacagaacaaaagcaaataaaatatataaataaataaacaacaaaaaagcaaccactaaaactaatggcatttgtacttcttaaactttatttaggaaggtcctagatataagttacgacttcttaaaacaaaccaacaacaccaacaaaacaataataaagagttgcttcacttaaaat

SEQ ID NO: 96076 - DNA, 474 bp, Chicken  19866894880735_1
ttagtaacaaaggaagatgtggcagtgggaaataaaaaccaagtgattcagtgcatctgttcattttaccaataggagatctaaacaggtgacagtatttcatttgcaactgcacagggaaaagctgcttcccagtcaaggacttacgtgagcagacgttattcttgatttaacacattaagtgtagaaaaaagaaaatcacaaattgtgcccagaagtgccacagttatcttttatatcagctgtggtactcaaagcctgacttacaccacacagtcctcagcctcctgtgctgaaggyggggggcagctgcaggtggttctcacacagaaggaacagagttccgtgtgtagcactgataatgtttgttgggcagcaaagcaggcagcacctctgcctgagtttccatactacacaggatggagtcattcaagggcaggctggacgcagctctgggcagcctggtctggtggt

SEQ ID NO: 96077 - DNA, 547 bp, Chicken  19866894880838_1
atggcaaaaatgtgttcctcaaatggtgaaagtaatacatgtgcaatctccttctctgtacagaaattaatcataacttccaaatttccaaaacttaggttattattttttttaacacttttttcttttgctggggcggttgagattagagatttagaagtttctcttccacagccctatgatattccttatgttctactagtcagtgatacaactaagccacattctggtattgcaggtcaacttgcagttctccaagcagagagggaaggctaagtgtgagcatattcttcagcctgmgtagttctgagcgtggtgggacataacctgggggctgacacaaccattttcttgatcccagaggagagaagtggcaaaaggcaaagtaaagccacttctatatcagttctactgggagtggaactaacagtagtgagcaaagagaagcaatttaaagacagcagatgctgctcttaggctcagtttataaaagatgtttcaggaaaggaaaggaaaggaaaggaagggaagggaagggaagggaagg

SEQ ID NO: 96078 - DNA, 600 bp, Chicken  19866894880898_1
gatgatgggatggagatttaggctcttctgtagtctgtgtctccaaagaaaagttcactatttcccagcgtcgagtatgtactgattaattgccctggtttctttgaacattgagcaggtagaacagaggcatctacccatatctttgtgtctcggtcttttaaattgttattggtaaaaatcttgatttgaagtcattttttttcaacctttggacagaaacgatctataaggtccaattaaagtgctgagaagaatctcattcagccatcagcattttagatgtgatgggaagagtgytggggctgcttgctgggtcgcagtagtccctgagtaaataaaagcaaggcatgyaacttgtctctacaaagtaaagtatttggtgrgatgggaaagrcaaaggaaaagtgcttctaatcacagtagctgcagccagaatccactccaaggcttcgtgctgatatacctgtgttagcaggtggaggagaactggacaggcacttggattgctcttctactgcctctggtttgtgaccatgtagttcagagtttttgtaagtctgtgtctcatcctgtatacatttatgcagaattagtaat

SEQ ID NO: 96079 - DNA, 600 bp, Chicken  19866894880898_2
tcactatttcccagcgtcgagtatgtactgattaattgccctggtttctttgaacattgagcaggtagaacagaggcatctacccatatctttgtgtctcggtcttttaaattgttattggtaaaaatcttgatttgaagtcattttttttcaacctttggacagaaacgatctataaggtccaattaaagtgctgagaagaatctcattcagccatcagcattttagatgtgatgggaagagtgytggggctgcttgctgggtcgcagtagtccctgagtaaataaaagcaaggcatgyaacttgtctctacaaagtaaagtatttggtgrgatgggaaagrcaaaggaaaagtgcttctaatcacagtagctgcagccagaatccactccaaggcttcgtgctgatatacctgtgttagcaggtggaggagaactggacaggcacttggattgctcttctactgcctctggtttgtgaccatgtagttcagagtttttgtaagtctgtgtctcatcctgtatacatttatgcagaattagtaatgtgtctttattcccaaaagatgttgaaagggtccctgatgctctgtagagccaa

SEQ ID NO: 96080 - DNA, 600 bp, Chicken  19866894880898_3
taattgccctggtttctttgaacattgagcaggtagaacagaggcatctacccatatctttgtgtctcggtcttttaaattgttattggtaaaaatcttgatttgaagtcattttttttcaacctttggacagaaacgatctataaggtccaattaaagtgctgagaagaatctcattcagccatcagcattttagatgtgatgggaagagtgytggggctgcttgctgggtcgcagtagtccctgagtaaataaaagcaaggcatgyaacttgtctctacaaagtaaagtatttggtgrgatgggaaagrcaaaggaaaagtgcttctaatcacagtagctgcagccagaatccactccaaggcttcgtgctgatatacctgtgttagcaggtggaggagaactggacaggcacttggattgctcttctactgcctctggtttgtgaccatgtagttcagagtttttgtaagtctgtgtctcatcctgtatacatttatgcagaattagtaatgtgtctttattcccaaaagatgttgaaagggtccctgatgctctgtagagccaagcacagtcaatatcagcaaacctaagagttaa

SEQ ID NO: 96081 - DNA, 600 bp, Chicken  19866894880898_4
gtttctttgaacattgagcaggtagaacagaggcatctacccatatctttgtgtctcggtcttttaaattgttattggtaaaaatcttgatttgaagtcattttttttcaacctttggacagaaacgatctataaggtccaattaaagtgctgagaagaatctcattcagccatcagcattttagatgtgatgggaagagtgytggggctgcttgctgggtcgcagtagtccctgagtaaataaaagcaaggcatgyaacttgtctctacaaagtaaagtatttggtgrgatgggaaagrcaaaggaaaagtgcttctaatcacagtagctgcagccagaatccactccaaggcttcgtgctgatatacctgtgttagcaggtggaggagaactggacaggcacttggattgctcttctactgcctctggtttgtgaccatgtagttcagagtttttgtaagtctgtgtctcatcctgtatacatttatgcagaattagtaatgtgtctttattcccaaaagatgttgaaagggtccctgatgctctgtagagccaagcacagtcaatatcagcaaacctaagagttaacaccatcactg

SEQ ID NO: 96082 - DNA, 600 bp, Chicken  19866894880898_5
tttgaacattgagcaggtagaacagaggcatctacccatatctttgtgtctcggtcttttaaattgttattggtaaaaatcttgatttgaagtcattttttttcaacctttggacagaaacgatctataaggtccaattaaagtgctgagaagaatctcattcagccatcagcattttagatgtgatgggaagagtgytggggctgcttgctgggtcgcagtagtccctgagtaaataaaagcaaggcatgyaacttgtctctacaaagtaaagtatttggtgrgatgggaaagrcaaargaaaagtgcttctaatcacagtagctgcagccagaatccactccaaggcttcgtgctgatatacctgtgttagcaggtggaggagaactggacaggcacttggattgctcttctactgcctctggtttgtgaccatgtagttcagagtttttgtaagtctgtgtctcatcctgtatacatttatgcagaattagtaatgtgtctttattcccaaaagatgttgaaagggtccctgatgctctgtagagccaagcacagtcaatatcagcaaacctaagagttaacaccatcactgctcag

SEQ ID NO: 96083 - DNA, 600 bp, Chicken  19866894880917_1
ttgtcatatattccccttatcaatattaactactgaccagtatttactggggcaagtgtatgcacttcaagatagagctttcactatatagatttctaaattgtatcttttttgttgtagagatgttttagtaagttttagaattgatttttttactgtttacttattttaacacttttgtgaacaagtgcagcaaactctgaagattttaaatttgcaagtgtagactaatatgataataagtttttgaagtgtatgcacgaagtactcaaaaaaaccatcaacctggaaacactattwaaaaaaaaaaaaaaaaagctgtttatctagacatatactcaatgacagctcataagaaaataaaatgtgcatctgatgctattaatcaatgctgttgtcaattgatcctaaaagagtctgactattctggggaaagtatacttgaggattctgctacaggagacaagttgtttcaaaaagcaatgtattttacattttgtgtgatagaagtttgtggggtttttttggactagttagaataaattggagtctaacagtgttttggatatgtaagaatcattaagaaggcagtatagatca

SEQ ID NO: 96084 - DNA, 599 bp, Chicken  19866894880985_1
  misc_feature (1)..(163): n is any nucleotide
nnnnnnnnnnnnnnnnnnnnnnnnnnnnnnnnnnnnnnnnnnnnnnnnnnnnnnnnnnnnnnnnnnnnnnnnnnnnnnnnnnnnnnnnnnnnnnnnnnnnnnnnnnnnnnnnnnnnnnnnnnnnnnnnnnnnnnnnnnnnnnnnnnnnnnnnnnnnnnnnnnnctaagtgatacaggctctatttaaaataactgaaattaaatctgtaaatgactgttaaagccttctgttgccttccaatatgactgatattcagcaaaaaaaaaacagcacttgtactcacctctactaatttttgrattgcagataatgctgatgaaagaaccagattttaggagatgactggacrtatgtgtaaaaaattttgatctgctgcatcaacatcttataaatgtactcagttttcctgatgaatcccagcatcactggttagatgttgcaagacrttgcaagccagccttcttycaatagagatggcagatacttgattccccatgtatraaatatgttttcaactgcagctacagtcaggttctcaaaatactaaattgtcttacatatttgcagaaccagatttcaacagaagacattgaagaac

SEQ ID NO: 96085 - DNA, 599 bp, Chicken  19866894880985_2
  misc_feature (1)..(113): n is any nucleotide
nnnnnnnnnnnnnnnnnnnnnnnnnnnnnnnnnnnnnnnnnnnnnnnnnnnnnnnnnnnnnnnnnnnnnnnnnnnnnnnnnnnnnnnnnnnnnnnnnnnnnnnnnnnnnnnnnctaagtgatacaggctctatttaaaataactgaaattaaatctgtaaatgactgttaaagccttctgttgccttccaatatgactgatattcagcaaaaaaaaaacagcacttgtactcacctctactaatttttgrattgcagataatgctgatgaaagaaccagattttaggagatgactggacrtatgtgtaaaaaattttgatctgctgcatcaacatcttataaatgtactcagttttcctgatgaatcccagcatcactggttagatgttgcaagacrttgcaagccagccttcttycaatagagatggcagatacttgattccccatgtatraaatatgttttcaactgcagctacagtcaggttctcaaaatactaaattgtcttacatatttgcagaaccagatttcaacagaagacattgaagaacagcatatgtgccttgagtgcatcccctgcaactccagagctattaaatag

SEQ ID NO: 96086 - DNA, 599 bp, Chicken  19866894880985_3
  misc_feature (1)..(16): n is any nucleotide
nnnnnnnnnnnnnnnnctaagtgatacaggctctatttaaaataactgaaattaaatctgtaaatgactgttaaagccttctgttgccttccaatatgactgatattcagcaaaaaaaaaacagcacttgtactcacctctactaatttttgrattgcagataatgctgatgaaagaaccagattttaggagatgactggacrtatgtgtaaaaaattttgatctgctgcatcaacatcttataaatgtactcagttttcctgatgaatcccagcatcactggttagatgttgcaagacrttgcaagccagccttcttycaatagagatggcagatacttgattccccatgtatraaatatgttttcaactgcagctacagtcaggttctcaaaatactaaattgtcttacatatttgcagaaccagatttcaacagaagacattgaagaacagcatatgtgccttgagtgcatcccctgcaactccagagctattaaatagcaggctaaggcaggaactgctgttaactaaagcagaacttggtacattgccatagtataataaaggtcacttccatataataagaagtattgcttta

SEQ ID NO: 96087 - DNA, 600 bp, Chicken  19866894880985_4
agtgatacaggctctatttaaaataactgaaattaaatctgtaaatgactgttaaagccttctgttgccttccaatatgactgatattcagcaaaaaaaaaacagcacttgtactcacctctactaatttttgrattgcagataatgctgatgaaagaaccagattttaggagatgactggacrtatgtgtaaaaaattttgatctgctgcatcaacatcttataaatgtactcagttttcctgatgaatcccagcatcactggttagatgttgcaagacrttgcaagccagccttcttycaatagagatggcagatacttgattccccatgtatraaatatgttttcaactgcagctacagtcaggttctcaaaatactaaattgtcttacatatttgcagaaccagatttcaacagaagacattgaagaacagcatatgtgccttgagtgcatcccctgcaactccagagctattaaatagcaggctaaggcaggaactgctgttaactaaagcagaacttggtacattgccatagtataataaaggtcacttccatataataagaagtattgctttagctccaactcagtatatctc

SEQ ID NO: 96088 - DNA, 600 bp, Chicken  19866894880985_5
atctgtaaatgactgttaaagccttctgttgccttccaatatgactgatattcagcaaaaaaaaaacagcacttgtactcacctctactaatttttgrattgcagataatgctgatgaaagaaccagattttaggagatgactggacrtatgtgtaaaaaattttgatctgctgcatcaacatcttataaatgtactcagttttcctgatgaatcccagcatcactggttagatgttgcaagacrttgcaagccagccttcttycaatagagatggcagatacttgattccccatgtatraaatatgttttcaactgcagctacagtcaggttctcaaaatactaaattgtcttacatatttgcagaaccagatttcaacagaagacattgaagaacagcatatgtgccttgagtgcatcccctgcaactccagagctattaaatagcaggctaaggcaggaactgctgttaactaaagcagaacttggtacattgccatagtataataaaggtcacttccatataataagaagtattgctttagctccaactcagtatatctcactaggatacatggtaaatggggtgtgcagtgtcaa

SEQ ID NO: 96089 - DNA, 599 bp, Chicken  19866894881015_1
  misc_feature (1)..(6): n is any nucleotide
nnnnnnctgaggacttctggtgctggtacttcttccatctgaagaattgctaggataggagctggaacatattccagagtcactatttttagtcttgcccctttcagcagatagctttttggctaattaccacaaaggcaaagtagatatgatcttaaatgcaatgcctatgatagcaggggaaaaggagcagagtaaccagaagaaaaggaatattactacataaagcctgtattaaagaaacaggacaatgagagcttctcagttgcaactccggatttctttccccagtggataagraaaaatccattcaatatttgctgtaagcccttatttaaatacacatccctaagcatctttattcttttcgaaaatgacctcccagccagcttcctctcagcaatgtgccttcccaaaaaccacaggaatcatcccacgtgcctgctataaaggagcacaacagctcccagcagcacctcatcgtgcaatcgcaactcccgagaaaggtaggcgcatctgtaacctggaattgatgatgtttaaaagacagacagaagacaaatatcacgtgttctccattttaaggcaagagaaaagga

SEQ ID NO: 96090 - DNA, 600 bp, Chicken  19866894881132_1
agcaaaattacaaaatcatgacaattaggaacttcatttggagcctgagacgtatctttagtcttcattctgtataattgtgctgctagttttctgatttctatagactcagtttcttcatacttctgaaggctgaaaagaatgtttcatttatagaaggtgatattttcatgagcatatgttgtaacattaataacattcagttgttgcaaatagataagtaagatatacctgtaaaagccaagatctcacaggagttattttgcacatctttgagtctatcaagaaattcacattttscaacaatagtatcaccatgaatatctttaaacacctaaaatttatcagtaaaaatcttcactaatggaactatcacggtacttttcaaggctataatgtgataataagatattccggggaaaaacataaaagttattgaatccttaagatgtatgtttgacaacataaaagtacatttagagtttaatttagaacataaattactgtacattactgaaatggaaattcaagtaaatttaattacctgtgtccattctcttttatttcatcgctctaacacatgggttgttcagccctgaa

SEQ ID NO: 96091 - DNA, 560 bp, Chicken  19866894881154_1
agcctgcattcagaatgtactcattccttttagtcaatcatcgatactagtactgctgtataaaactcacagaaatataagaatatatatatgtaaagaaaagttagatcttgataggaatttagtgacattccaggtgagaaactgcacagaattagaaggtggctgaaccttactgaggtttactacatatcttttaagtgaaacataacttaaaattactgataacctggtatgatgtgaatgtctttctcatgccagttccagctttatttcttaatctaggaagattgggtaccrtttatttattattattattattatattaatttgaaaggacttcttttgtacacatttgaagtacacatttgaaaggacttctaaaaagatgaaccagaggttttttttcaaagtttcattgttagaacatctttcccaagcaattgtcttgaaagacaaaaatgtacatggagcagaattaaggagtacttatattaaggaggacatcaattttaatggataagttgacaatgatactcacattatttatccagcgtgat

SEQ ID NO: 96092 - DNA, 600 bp, Chicken  19866894881243_1
taaataagatccctacaaaatatcaggtgttaccccatggggaaagtaagggtaagctatgagcaccacagctatttcctcatgcagccatttcctgcaaagcgcttccgaaacactatcacagcaagcagcaggagcctgaaggagtgggaacaagtgacagacagcaccttcacgtttagactgttggtttaactggcaaaccaaaattgaactgcttcacagaagtttaaaactttgcccctatgccatgagtttactcttaaaaaagcagtcctacaacatcccctcagatcaccragcacaacagctccatataaaagaacattcatgaactgcttgtttgctcctcttttctggttgaaggtgagggtatggacagtgcatcactcctttacaaagacccctctggaatccaagctcattcccactgatgtccagaagacttcctactcagttctgttaagtgttacatcaggttcctctgcagattgttttcccatttcctcttgaatgaatgtacaaagcttaccctcctcacttgatgtggaacccttacctgcagcactcagatctcaacagctcacctgcacaaaccca

SEQ ID NO: 96093 - DNA, 599 bp, Chicken  19866894881250_1
  misc_feature (1)..(15): n is any nucleotide
nnnnnnnnnnnnnnnatgtggagggtagtcatgcaggagagctcagtctagtgctatgaagcaaccgtttttggagaagccaggctgatccatccctaacagcaggtcccaacccacactgcccccccagcctggagttctgagcagccaactccatgtagccagtagagtgagcaaggtgatcatccccctctgctctgccctggtgaggccacatttggagttctgtgtccagttctgatgggacaaggtccaatggctaaaaatggaatacaggaagttccacacaactatacagargaacttctttasagggagagcttctgtatrgtgttccagcgagatctggaacaagctgtccagacaggtggtggagtcttctgtggagatattcaagatccatctgggcacccacctgtgtgacttactgcaggggacctgctttagcagtggggttgaactcgatgagcccaagaggtccmttcaacccctgcaattctatgactccatgtyccatgagtgcttgaggaatcctctggaaaggagccttaagtaacagggaaccccacatggaaggacaagttctacatccaggagat

SEQ ID NO: 96094 - DNA, 599 bp, Chicken  19866894881250_2
  misc_feature (1)..(3): n is any nucleotide
nnnatgtggagggtagtcatgcaggagagctcagtctagtgctatgaagcaaccgtttttggagaagccaggctgatccatccctaacagcaggtcccaacccacactgcccccccagcctggagttctgagcagccaactccatgtagccagtagagtgagcaaggtgatcatccccctctgctctgccctggtgaggccacatttggagttctgtgtccagttctgatgggacaaggtccaatggctaaaaatggaatacaggaagttccacacaactatacagargaacttctttasagggagagcttctgtatrgtgttccagcgagatctggaacaagctgtccagacaggtggtggagtcttctgtggagatattcaagatccatctgggcacccacctgtgtgacttactgcaggggacctgctttagcagtggggttgaactcgatgagcccaagaggtccmttcaacccctgcaattctatgactccatgtyccatgagtgcttgaggaatcctctggaaaggagccttaagtaacagggaaccccacatggaaggacaagttctacatccaggagatayggcagctggg

SEQ ID NO: 96095 - DNA, 600 bp, Chicken  19866894881250_3
atgcaggagagctcagtctagtgctatgaagcaaccgtttttggagaagccaggctgatccatccctaacagcaggtcccaacccacactgcccccccagcctggagttctgagcagccaactccatgtagccagtagagtgagcaaggtgatcatccccctctgctctgccctggtgaggccacatttggagttctgtgtccagttctgatgggacaaggtccaatggctaaaaatggaatacaggaagttccacacaactatacagargaacttctttasagggagagcttctgtatrgtgttccagcgagatctggaacaagctgtccagacaggtggtggagtcttctgtggagatattcaagatccatctgggcacccacctgtgtgacttactgcaggggacctgctttagcagtggggttgaactcgatgagcccaagaggtccmttcaacccctgcaattctatgactccatgtyccatgagtgcttgaggaatcctctggaaaggagccttaagtaacagggaaccccacatggaaggacaagttctacatccaggagatayggcagctgggaaatagtgatatttatttg

SEQ ID NO: 96096 - DNA, 600 bp, Chicken  19866894881250_4
tcatccccctctgctctgccctggtgaggccacatttggagttctgtgtccagttctgatgggacaaggtccaatggctaaaaatggaatacaggaagttccacacaactatacagargaacttctttasagggagagcttctgtatrgtgttccagcgagatctggaacaagctgtccagacaggtggtggagtcttctgtggagatattcaagatccatctgggcacccacctgtgtgacttactgcaggggacctgctttagcagtggggttgaactcgatgagcccaagaggtccmttcaacccctgcaattctatgactccatgtyccatgagtgcttgaggaatcctctggaaaggagccttaagtaacagggaaccccacatggaaggacaagttctacatccaggagatayggcagctgggaaatagtgatatttatttgttctcctacctgacactgtcatcgtcccccacactgcgtcttgcaaaggcttcctttcaggtctttgtcctgtgcaacatctgagtgcagatgacctgaagaagggtgaatgttctagaggcttgccaggccaagccagcttgggatctgtg

SEQ ID NO: 96097 - DNA, 600 bp, Chicken  19866894881250_5
acatttggagttctgtgtccagttctgatgggacaaggtccaatggctaaaaatggaatacaggaagttccacacaactatacagargaacttctttasagggagagcttctgtatrgtgttccagcgagatctggaacaagctgtccagacaggtggtggagtcttctgtggagatattcaagatccatctgggcacccacctgtgtgacttactgcaggggacctgctttagcagtggggttgaactcgatgagcccaagaggtccmttcaacccctgcaattctatgactccatgtyccatgagtgcttgaggaatcctctggaaaggagccttaagtaacagggaaccccacatggaaggacaagttctacatccaggagatayggcagctgggaaatagtgatatttatttgttctcctacctgacactgtcatcgtcccccacactgcgtcttgcaaaggcttcctttcaggtctttgtcctgtgcaacatctgagtgcagatgacctgaagaagggtgaatgttctagaggcttgccaggccaagccagcttgggatctgtgccagggcaaaagaggcagctgaatctctgct

SEQ ID NO: 96098 - DNA, 521 bp, Chicken  19866894881250_6
aacttctttasagggagagcttctgtatrgtgttccagcgagatctggaacaagctgtccagacaggtggtggagtcttctgtggagatattcaagatccatctgggcacccacctgtgtgacttactgcaggggacctgctttagcagtggggttgaactcgatgagcccaagaggtccmttcaacccctgcaattctatgactccatgtyccatgagtgcttgaggaatcctctggaaaggagccttaagtaacagggaaccccacatggaaggacaagttctacatccaggagatayggcagctgggaaatagtgatatttatttgttctcctacctgacactgtcatcgtcccccacactgcgtcttgcaaaggcttcctttcaggtctttgtcctgtgcaacatctgagtgcagatgacctgaagaagggtgaatgttctagaggcttgccaggccaagccagcttgggatctgtgccagggcaaaagaggcagctgaatctctgctgaatcccat

SEQ ID NO: 96099 - DNA, 600 bp, Chicken  19866894881527_1
ttttgcttatcacttagtgaagtcattaatgctcagatttcagctgttaaaaatttcttccctgccacattattctgtttgctgattcctgaattagtccaatataaagcaaagataaaatttagaatggaaatattatgaattattgctcattctcatttcccagttcaagaacattcaacttctttttctgcccagcttctgcctggacagcttcagcaacagttcttcgagactcttacctctatttctgcaaagcattggcctgcaaacacgtgtcccccatcctccaccacataytggataagcttcccagccgaaggtgagcgcagaatagaaggatcattttccttttcaaacacacaggtcttgttacctatagtgatgcgatacctagraaataacagrtagaacggaattaggttgcaaaagactttcaggaccatcaagcccaaccatccacctaacatgacaagtccactgataaatcacatccctacgcaccacgtccacatctcttaaatgttcccaggtagcagaatactaccacttccctgggcagtctgttacaacacctaactacctctcctttgaataaat

SEQ ID NO: 96100 - DNA, 600 bp, Chicken  19866894881527_2
ccaatataaagcaaagataaaatttagaatggaaatattatgaattattgctcattctcatttcccagttcaagaacattcaacttctttttctgcccagcttctgcctggacagcttcagcaacagttcttcgagactcttacctctatttctgcaaagcattggcctgcaaacacgtgtcccccatcctccaccacataytggataagcttcccagccgaaggtgagcgcagaatagaaggatcattttccttttcaaacacacaggtcttgttacctatagtgatgcgatacctagraaataacagrtagaacggaattaggttgcaaaagactttcaggaccatcaagcccaaccatccacctaacatgacaagtccactgataaatcacatccctacgcaccacgtccacatctcttaaatgttcccaggtagcagaatactaccacttccctgggcagtctgttacaacacctaactacctctcctttgaataaattctttctggtatccaatctaaatctcctctggcacatattttaaatcacaaaccatgaagctttaggaaatgggaatctgagcccacctaaataacct

SEQ ID NO: 96101 - DNA, 600 bp, Chicken  19866894881527_3
gcaaagataaaatttagaatggaaatattatgaattattgctcattctcatttcccagttcaagaacattcaacttctttttctgcccagcttctgcctggacagcttcagcaacagttcttcgagactcttacctctatttctgcaaagcattggcctgcaaacacgtgtcccccatcctccaccacataytggataagcttcccagccgaaggtgagcgcagaatagaaggatcattttccttttcaaacacacaggtcttgttacctatagtgatgcgatacctagraaataacagrtagaacggaattaggttgcaaaagactttcaggaccatcaagcccaaccatccacctaacatgacaagtccactgataaatcacatccctacgcaccacgtccacatctcttaaatgttcccaggtagcagaatactaccacttccctgggcagtctgttacaacacctaactacctctcctttgaataaattctttctggtatccaatctaaatctcctctggcacatattttaaatcacaaaccatgaagctttaggaaatgggaatctgagcccacctaaataacctgcacatggtt

SEQ ID NO: 96102 - DNA, 599 bp, Chicken  19866894881602_1
  misc_feature (1)..(168): n is any nucleotide
nnnnnnnnnnnnnnnnnnnnnnnnnnnnnnnnnnnnnnnnnnnnnnnnnnnnnnnnnnnnnnnnnnnnnnnnnnnnnnnnnnnnnnnnnnnnnnnnnnnnnnnnnnnnnnnnnnnnnnnnnnnnnnnnnnnnnnnnnnnnnnnnnnnnnnnnnnnnnnnnnnnnnnnnaatccctcacccattgtgaacagcagcggattgatccaaccggagctggtcttcaccaaggaagtgtgcggggcaagcagatgccatgaaaacacggtgctaagcacagcccagcacttagcgtaaccagckcctggttagccctaggtggcttttagggctaagtgaaagcatggctttactccaaatcacagtgtcatctatttcctcatgcagcttgaaacgatgctcagtatttttttgaacaatygtatttcatttgatcatttttaagggaggcataagggagccgtgaggtgagctgggtaggagtgacaaagaagggttgggacattgtgacagccactaggcctatccagtctcatgtttaatgtgggattttttggccaaaggagccccttattaaagatactaatgctgtcaatagcatt

SEQ ID NO: 96103 - DNA, 599 bp, Chicken  19866894881602_2
  misc_feature (1)..(50): n is any nucleotide
nnnnnnnnnnnnnnnnnnnnnnnnnnnnnnnnnnnnnnnnnnnnnnnnnnaatccctcacccattgtgaacagcagcggattgatccaaccggagctggtcttcaccaaggaagtgtgcggggcaagcagatgccatgaaaacacggtgctaagcacagcccagcacttagcgtaaccagckcctggttagccctaggtggcttttagggctaagtgaaagcatggctttactccaaatcacagtgtcatctatttcctcatgcagcttgaaacgatgctcagtatttttttgaacaatygtatttcatttgatcatttttaagggaggcataagggagccgtgaggtgagctgggtaggagtgacaaagaagggttgggacattgtgacagccactaggcctatccagtctcatgtttaatgtgggattttttggccaaaggagccccttattaaagatactaatgctgtcaatagcattgtacaacagtcaagcagcaaaaggagagcagcattgatcccttctttcagtgcctctcacgatttcataaacttctgcaaggcccctctgctcagatgtcttgcctttagactgcttt

SEQ ID NO: 96104 - DNA, 600 bp, Chicken  19866894881663_1
tgtatgtggctctgagcaggagtccatgccagcctcagctattttgagatcccatgatgtggagccagagctcagcttgtgccccctcatgctatggagacaggagagtcagttccctcaagtcagaagggattgcctaccaaggggtctcatcctcctccacctctgcaaagcagaagcacagccacatctcctggctgcctgtaacatggtttcctcggcagtagtgtgggctaaggggaaaggagagggaaatgtggcctcccatccctcttgctgtggtttaaatgcaggcgcacrccycaagatgcactgagaaatgcagcagcaatgacatagcttcactccttcttacagcattgccatgttgccttttattagctccaatgaaacacacacrgtatagataagacagaagcaagacagatcagcacccagctagttaatgatgttttgagtgcaatgaagacttatcaaaaagccgtgggagcataggaggaaggaactgccctttcagagatgttataaatggccttacaagcagacaagtatccgtgtgctttggactggtaaaaagcaacccgctagaaacaactgctc

SEQ ID NO: 96105 - DNA, 600 bp, Chicken  19866894881663_2
atgtggctctgagcaggagtccatgccagcctcagctattttgagatcccatgatgtggagccagagctcagcttgtgccccctcatgctatggagacaggagagtcagttccctcaagtcagaagggattgcctaccaaggggtctcatcctcctccacctctgcaaagcagaagcacagccacatctcctggctgcctgtaacatggtttcctcggcagtagtgtgggctaaggggaaaggagagggaaatgtggcctcccatccctcttgctgtggtttaaatgcaggcgcacrccycaagatgcactgagaaatgcagcagcaatgacatagcttcactccttcttacagcattgccatgttgccttttattagctccaatgaaacacacacrgtatagataagacagaagcaagacagatcagcacccagctagttaatgatgttttgagtgcaatgaagacttatcaaaaagccgtgggagcataggaggaaggaactgccctttcagagatgttataaatggccttacaagcagacaagtatccgtgtgctttggactggtaaaaagcaacccgctagaaacaactgctcatc

SEQ ID NO: 96106 - DNA, 600 bp, Chicken  19866894881663_3
caggagagtcagttccctcaagtcagaagggattgcctaccaaggggtctcatcctcctccacctctgcaaagcagaagcacagccacatctcctggctgcctgtaacatggtttcctcggcagtagtgtgggctaaggggaaaggagagggaaatgtggcctcccatccctcttgctgtggtttaaatgcaggcgcacrccycaagatgcactgagaaatgcagcagcaatgacatagcttcactccttcttacagcattgccatgttgccttttattagctccaatgaaacacacacrgtatagataagacagaagcaagacagatcagcacccagctagttaatgatgttttgagtgcaatgaagacttatcaaaaagccgtgggagcataggaggaaggaactgccctttcagagatgttataaatggccttacaagcagacaagtatccgtgtgctttggactggtaaaaagcaacccgctagaaacaactgctcatcgacgtgggcgtgatgcaaaaaatgtctcgctcagatttcctaaaaggctgcttcaacgcaatttgctggctttcctgctttgcaatttttccattct

SEQ ID NO: 96107 - DNA, 600 bp, Chicken  19866894881792_1
aagatcttggcttctgataaagagattcaagtatggctgagaaaatgaaattttattttgcttgtaaaacaaaattatagggtgagcaaagctctgctcaactcaaagttgtagaactgagattcaactttttaagactttaatcatgctaaatattatttcaattatcagagactcactggttttggtttgttagtatccctagatactgggtacaaaggagagtggattcaagggtagcagttctcaagagtagacagggtcttgatttatgtctggtcaagtggaagaggaccatcwactgttttatagagtaagacaagtattcacagtcccaaaggaggggggggaggaaagagagtttttgagtaaataggaagtcaaaagacatgaatgaatgttcttaaagtagcagtttagtgtgcttgtatatctctgtaggtggaactgggtgtttttttccaacactaagtttttacaaatgagtcagctttcctcagctctgtgtggatacattactaatgttataatgtgttaaagtgttcccaagctgacttaaatttagaaatattgatttccagggacttcagcataacacct

SEQ ID NO: 96108 - DNA, 600 bp, Chicken  19866894881839_1
attaaaaccctctgagcctacaacctcccttggccaacgagcgggaaaaacgtgccagcattaatttctgtctcctcttccatccagcagatgttttttcatgaatgagcatgtcgaggtggaaggggaagagggggagatatgggaggaggaggaggacagcccttcctcacctttgacacagggaagcctctgcacagaggctgcagggctgagccagcaatgcttggggctgacccgcaagctgagcaagtggaaagcaagatgaagcttttctttttttctctttgctgacagaasagaatgcttccgaaggtagaaatgtttccaagagatcaccaggtggatgggtgtgggttttggtggagcaacgagcagcaacgaacccagtggtactcccagcagcaccggggctgcacaggggccacacatccctgtacccagcacttgtctggctcccaggcagggatatgtgatgcaggytttcccctctgccacgttgagatgggacacaaaggatgctacaggcacagtttaacgtttagtaatgctagaagcccatcctgacattcatcaactggtctcccagttttctgcttg

SEQ ID NO: 96109 - DNA, 600 bp, Chicken  19866894881839_2
gggaagcctctgcacagaggctgcagggctgagccagcaatgcttggggctgacccgcaagctgagcaagtggaaagcaagatgaagcttttctttttttctctttgctgacagaasagaatgcttccgaaggtagaaatgtttccaagagatcaccaggtggatgggtgtgggttttggtggagcaacgagcagcaacgaacccagtggtactcccagcagcaccggggctgcacaggggccacacatccctgtacccagcacttgtctggctcccaggcagggatatgtgatgcaggytttcccctctgccacgttgagatgggacacaaaggatgctacaggcacagtttaacgtttagtaatgctagaagcccatcctgacattcatcaactggtctcccagttttctgcttgtatttcacagaatcatagaatggcctgggttgaaagggaccacaatgatcatccagtttcaagcccctgctatgtgtggggtcaccaaccaccagaccaggctgcccagagccacatccagcctggccttgaatgcctccagggatggggcatccacagcctccttgggcaacctgttccagt

SEQ ID NO: 96110 - DNA, 599 bp, Chicken  19866894881868_1
  misc_feature (1)..(107): n is any nucleotide
nnnnnnnnnnnnnnnnnnnnnnnnnnnnnnnnnnnnnnnnnnnnnnnnnnnnnnnnnnnnnnnnnnnnnnnnnnnnnnnnnnnnnnnnnnnnnnnnnnnnnnnnnnnttctcaggcaatgagttggaaagacagaactgcccaggcagaaatcaatagaattttgacctccctcccctccccccaattaaagatcttcatcagatgaagaaacacctgtgtctgatccttacagaaccctgagaacaatccagattgatgatttagactttctcatgaaaattcaaaagacgtttgtgcmgtattttaagagacatgtgaaaggagcaaagtaagatccttcactatgtatggatcatggcaaaaatacttacacagctaaagaataaacagaaaacaagatattctagaaaatgcgttatggaaccaataataccactgaaataagctaagatgtggctggcggtgcccaaggcacagaaggagatcgatcccaaataggtcatggagctatggagctgctcgactgtccccagagctggtaaccacctgctgctgtcttaaaagaaggacagtggtaagaaaaggatcaaaaaagag

SEQ ID NO: 96111 - DNA, 600 bp, Chicken  19866894882001_1
agcgggtggaccatttatctacacaccaaggagagaaatccagagggcctgcagtagggaggatgtgtgtatgccttgaaggacagaacaacagccaggagcagagtcagacacaagcctgaagaatggaagcagccagcaaggaggctgcagtgcaaggagcagagatctgatggacagacagacataatcacagttgaattcgcgaagcctcagggtcaacggggaacattcttacttccctgtctctgttgtggttgaagagcattttccaaaggtataagtgacagctaggtacckgatcttcacgattactaggtgcatgctacctgacttcccactgccttttaacggcactgaatttaggcctaagragaaaacagtctaagccctgattccagatactcgtrctgrtggatcaaaattaaacaaaacaggtgctcaagacagaatgcgcaaacaacccccgatcagtgctacacagcgcagtcatgctggcaggaatgggttcatgagctatgtcatgacctgcaccacagttcctcttagcctctaggcaaagctgtaccatgtcccagtcattgtgctgtgtgaggtgaa

SEQ ID NO: 96112 - DNA, 588 bp, Chicken  19866894882001_2
cttgaaggacagaacaacagccaggagcagagtcagacacaagcctgaagaatggaagcagccagcaaggaggctgcagtgcaaggagcagagatctgatggacagacagacataatcacagttgaattcgcgaagcctcagggtcaacggggaacattcttacttccctgtctctgttgtggttgaagagcattttccaaaggtataagtgacagctaggtacckgatcttcacgattactaggtgcatgctacctgacttcccactgccttttaacggcactgaatttaggcctaagragaaaacagtctaagccctgattccagatactcgtrctgrtggatcaaaattaaacaaaacaggtgctcaagacagaatgcgcaaacaacccccgatcagtgctacacagcgcagtcatgctggcaggaatgggttcatgagctatgtcatgacctgcaccacagttcctcttagcctctaggcaaagctgtaccatgtcccagtcattgtgctgtgtgaggtgaactaggcatatggggggatgtgaactgcttggccacagtgcatttgtagctttaatactgcac

SEQ ID NO: 96113 - DNA, 552 bp, Chicken  19866894882001_3
acacaagcctgaagaatggaagcagccagcaaggaggctgcagtgcaaggagcagagatctgatggacagacagacataatcacagttgaattcgcgaagcctcagggtcaacggggaacattcttacttccctgtctctgttgtggttgaagagcattttccaaaggtataagtgacagctaggtacckgatcttcacgattactaggtgcatgctacctgacttcccactgccttttaacggcactgaatttaggcctaagragaaaacagtctaagccctgattccagatactcgtrctgrtggatcaaaattaaacaaaacaggtgctcaagacagaatgcgcaaacaacccccgatcagtgctacacagcgcagtcatgctggcaggaatgggttcatgagctatgtcatgacctgcaccacagttcctcttagcctctaggcaaagctgtaccatgtcccagtcattgtgctgtgtgaggtgaactaggcatatggggggatgtgaactgcttggccacagtgcatttgtagctttaatactgcac

SEQ ID NO: 96114 - DNA, 548 bp, Chicken  19866894882001_4
aagcctgaagaatggaagcagccagcaaggaggctgcagtgcaaggagcagagatctgatggacagacagacataatcacagttgaattcgcgaagcctcagggtcaacggggaacattcttacttccctgtctctgttgtggttgaagagcattttccaaaggtataagtgacagctaggtacckgatcttcacgattactaggtgcatgctacctgacttcccactgccttttaacggcactgaatttaggcctaagragaaaacagtctaagccctgattccagatactcgtrctgrtggatcaaaattaaacaaaacaggtgctcaagacagaatgcgcaaacaacccccgatcagtgctacacagcgcagtcatgctggcaggaatgggttcatgagctatgtcatgacctgcaccacagttcctcttagcctctaggcaaagctgtaccatgtcccagtcattgtgctgtgtgaggtgaactaggcatatggggggatgtgaactgcttggccacagtgcatttgtagctttaatactgcac

SEQ ID NO: 96115 - DNA, 599 bp, Chicken  19866894882159_1
  misc_feature (1)..(102): n is any nucleotide
nnnnnnnnnnnnnnnnnnnnnnnnnnnnnnnnnnnnnnnnnnnnnnnnnnnnnnnnnnnnnnnnnnnnnnnnnnnnnnnnnnnnnnnnnnnnnnnnnnnnnnacaatgagtcagaagagaaagagtcctcatgaaccaactggacttaaagctgatgtctgccacaagattccagaaaattatttggcaaaaaaatcaacaccggagggacagctttgttaataatgtaaatagttcactttaacaaattgccaattttgcaaaaggcattaatctgtgggctttgacccaagaatgcayaatgctcattgctacagaacaaatacaatattaagaaagctagccactgcataccacttaggagtgaagcaaatggacagatcatgtacagtcagaatttggcatcataatgcatggcaaaaaagaaaactaagtgaacatggagtcaatactayattttrggcatggatttaattccactggaatcactgaccttagccagtaggtggactaactcttggccacacgtccctgaggaaataccatgraagaacttgcttcttcattaattttatactttattaagttcatagagaaga

SEQ ID NO: 96116 - DNA, 600 bp, Chicken  19866894882159_2
tgtctgccacaagattccagaaaattatttggcaaaaaaatcaacaccggagggacagctttgttaataatgtaaatagttcactttaacaaattgccaattttgcaaaaggcattaatctgtgggctttgacccaagaatgcayaatgctcattgctacagaacaaatacaatattaagaaagctagccactgcataccacttaggagtgaagcaaatggacagatcatgtacagtcagaatttggcatcataatgcatggcaaaaaagaaaactaagtgaacatggagtcaatactayattttrggcatggatttaattccactggaatcactgaccttagccagtaggtggactaactcttggccacacgtccctgaggaaataccatgraagaacttgcttcttcattaattttatactttattaagttcatagagaagaattctaattttcaagcaaagtacaaaaaccccacaggatgagagggttcgaggaaagctattatagatgtaaagtgcacttcctctggaacactgcatctcatctaagaagcagtctgttgtgtgagctccagttatttagtgctatacagaatga

SEQ ID NO: 96117 - DNA, 600 bp, Chicken  19866894882159_3
ccacaagattccagaaaattatttggcaaaaaaatcaacaccggagggacagctttgttaataatgtaaatagttcactttaacaaattgccaattttgcaaaaggcattaatctgtgggctttgacccaagaatgcayaatgctcattgctacagaacaaatacaatattaagaaagctagccactgcataccacttaggagtgaagcaaatggacagatcatgtacagtcagaatttggcatcataatgcatggcaaaaaagaaaactaagtgaacatggagtcaatactayattttrggcatggatttaattccactggaatcactgaccttagccagtaggtggactaactcttggccacacgtccctgaggaaataccatgraagaacttgcttcttcattaattttatactttattaagttcatagagaagaattctaattttcaagcaaagtacaaaaaccccacaggatgagagggttcgaggaaagctattatagatgtaaagtgcacttcctctggaacactgcatctcatctaagaagcagtctgttgtgtgagctccagttatttagtgctatacagaatgatattac

SEQ ID NO: 96118 - DNA, 571 bp, Chicken  19866894882159_4
ttgccaattttgcaaaaggcattaatctgtgggctttgacccaagaatgcayaatgctcattgctacagaacaaatacaatattaagaaagctagccactgcataccacttaggagtgaagcaaatggacagatcatgtacagtcagaatttggcatcataatgcatggcaaaaaagaaaactaagtgaacatggagtcaatactayattttrggcatggatttaattccactggaatcactgaccttagccagtaggtggactaactcttggccacacgtccctgaggaaataccatgraagaacttgcttcttcattaattttatactttattaagttcatagagaagaattctaattttcaagcaaagtacaaaaaccccacaggatgagagggttcgaggaaagctattatagatgtaaagtgcacttcctctggaacactgcatctcatctaagaagcagtctgttgtgtgagctccagttatttagtgctatacagaatgatattactatacacttgcagctaccataaatctcaatgaatactggtcagctctgcacgttctat

SEQ ID NO: 96119 - DNA, 599 bp, Chicken  19866894882203_1
  misc_feature (1)..(14): n is any nucleotide
nnnnnnnnnnnnnntgaacagaagtgtttattaggaaggtctacattagtatagtgttgagtactacgagaaaataatgttctacgaagtatattaattttggaaaattcaccatatttgcaaagaggatctgcaagactgttttgattccacctgtgaacattcttaaaaacaataacatcggttttcagaagaactgaaacctatgatttcatttctgtttgtttctcttgtaacatgaaataaatcgttatgactacaataagaaattccacacctacttgtttccttactggctgygtgtaggtagcattctattctgggacactgatgtttaggtaatgcaaatgttgtctaggatttcctgcaaagtaggtcacccactgtttgttccacagaattaataccaaaggttgttatctctcaggaaataaagtgcaaaagggctaaagtgagttcacatttgaaaaacaaatctgaatgtggttaagtttaagtttgagctgaatataaaagagtggtgtaatactgtctagtactctttatatattttagtttcaataatttattagtaggagttctcaaaagcgtgcttcagc

SEQ ID NO: 96120 - DNA, 599 bp, Chicken  19866894882303_1
  misc_feature (1)..(70): n is any nucleotide
nnnnnnnnnnnnnnnnnnnnnnnnnnnnnnnnnnnnnnnnnnnnnnnnnnnnnnnnnnnnnnnnnnnnnnattatggaaaaggcaattttgaaagcacatttattcagttgctttaatagcatgtgtcattttccccagtccaaatattgactactgtacctttgtgtgtccattgctctccagtgaggttgttagataaccactgtacacagccacaaagtggttgttgttgaaagggacctctggagatgcctgtctggcaacaaactgctcattgtaagtactctcagtgttctgtygtctccagcataggtcactttttcatctggggggatttcttagagataggaagacatcccggtacataactgccttcattgtatccagagactgaaagcactgaacacgtccagttaaacagttttataataacatttaaattaataacataagatccctatgcattctgcttaaggtcagctgtcttactgctttgttatgtgtgatcttctcacctctgcaacctcccgtggcagtttggtaaacttgatttgccttttccagttgttaagtgaaagtagcctcagtcaccatcacc

SEQ ID NO: 96121 - DNA, 588 bp, Chicken  19866894882371_1
gaaaaagtgaaactatagctggcaaacaaaacaattactctaagaactctgcatcacttgaggggggattttccacccttctaagagccttatccagagataacaaatcaaaaacactgtaactgaatctacagccactgactatgacctaactgctatacctgccccaaaagcagagtctatggcagtgtaacaggttcttctggagggagcagccacatccctacaaggcagggacacttctggattcccctcctggggaggtttggctcatgcagggaggaagagcttacaacttargacccttccctccaaggtgatgagaaaaagcatttagagcattttaatattaatgatgcaattacagtaacaacagctctgttcaccaccgtcccattgcagcaggcacatgcgagtgccctgttacaacattacacaactgtttagcagaggatgctttcagagaactccttgcactaaatcagcattatgtttttagaggttaaccagtgttgtgtgcttaattcagtttccgtggcacatacataaagcctttaaaggcatgattgcatttctcatacagactca

SEQ ID NO: 96122 - DNA, 600 bp, Chicken  19866894882617_1
tttttgattcataccccagttaatccctagctttagcctagtctgctggttgatggagtccaaagggatgacacacaacagcaggatgagtggtttggtgttgatgcagaaagcaaccccaggactagctggggaaccaagcttattccaaccctacagttctgcctcattccctctctgccagcagaagcagtaggagcagttttgtcaggttgcggaccagtagtttttcaccatttccaacaaatcttgcagtgacaaggactgcaagcatacaaggaaagtcttggaatcataaartagaaccattgaatcatcaaggttggaaagggccactaggatcatctagtccaactgttgacccaaccccaccatgcccattagcatgtccctcaakgccacacctacacggttcttggacacccccagggatggtgactccaccacctccctggtctgcctgtgccagtacaamtcttttagagaagaaatttttcctaatatcaggcctaatatcctaatgtcttgtaatggatgagctccagtgygtaagagcagtctgtggagcaattgtttgtctccagcccaaaattcccccaa

SEQ ID NO: 96123 - DNA, 600 bp, Chicken  19866894882617_2
gtgttgatgcagaaagcaaccccaggactagctggggaaccaagcttattccaaccctacagttctgcctcattccctctctgccagcagaagcagtaggagcagttttgtcaggttgcggaccagtagtttttcaccatttccaacaaatcttgcagtgacaaggactgcaagcatacaaggaaagtcttggaatcataaartagaaccattgaatcatcaaggttggaaagggccactaggatcatctagtccaactgttgacccaaccccaccatgcccattagcatgtccctcaakgccacacctacacggttcttggacacccccagggatggtgactccaccacctccctggtctgcctgtgccagtacaamtcttttagagaagaaatttttcctaatatcaggcctaatatcctaatgtcttgtaatggatgagctccagtgygtaagagcagtctgtggagcaattgtttgtctccagcccaaaattcccccaaaaggacgactttctccaaacttccttcagggtttgaggcacccaagactgacaagtcagatccaaggtggatctgaaccgggtctcctgtgatggtg

SEQ ID NO: 96124 - DNA, 600 bp, Chicken  19866894882617_3
ctctgccagcagaagcagtaggagcagttttgtcaggttgcggaccagtagtttttcaccatttccaacaaatcttgcagtgacaaggactgcaagcatacaaggaaagtcttggaatcataaartagaaccattgaatcatcaaggttggaaagggccactaggatcatctagtccaactgttgacccaaccccaccatgcccattagcatgtccctcaakgccacacctacacggttcttggacacccccagggatggtgactccaccacctccctggtctgcctgtgccagtacaamtcttttagagaagaaatttttcctaatatcaggcctaatatcctaatgtcttgtaatggatgagctccagtgygtaagagcagtctgtggagcaattgtttgtctccagcccaaaattcccccaaaaggacgactttctccaaacttccttcagggtttgaggcacccaagactgacaagtcagatccaaggtggatctgaaccgggtctcctgtgatggtgtggaactgagaaccttcactccatctctggccattgctgggcacatcttggggtacaggtggacctgctcagtgctgg

SEQ ID NO: 96125 - DNA, 600 bp, Chicken  19866894882617_4
cttgcagtgacaaggactgcaagcatacaaggaaagtcttggaatcataaartagaaccattgaatcatcaaggttggaaagggccactaggatcatctagtccaactgttgacccaaccccaccatgcccattagcatgtccctcaakgccacacctacacggttcttggacacccccagggatggtgactccaccacctccctggtctgcctgtgccagtacaamtcttttagagaagaaatttttcctaatatcaggcctaatatcctaatgtcttgtaatggatgagctccagtgygtaagagcagtctgtggagcaattgtttgtctccagcccaaaattcccccaaaaggacgactttctccaaacttccttcagggtttgaggcacccaagactgacaagtcagatccaaggtggatctgaaccgggtctcctgtgatggtgtggaactgagaaccttcactccatctctggccattgctgggcacatcttggggtacaggtggacctgctcagtgctggggctcacctatatcttggagagtggggaattggtctccttgagccaaaatgtgagtattgaagcttgagcaca

SEQ ID NO: 96126 - DNA, 600 bp, Chicken  19866894882652_1
attgttcaataagtgaaaatccaagtgaagaacatagacaaaataataaagcttctggcaagtttaatttgaagtcataataaaactagccgagaaagattctgaggagcaagggtgtaagacatgataataaaaacttttttaagtacatcagaaacaggaagtttgccagcaaattgatggagccaatatattactggaatgcaaaaagaccactttaaaaatataggtcttcaacaaaaaggatcacaattatcacaggcacagatgttcattatggagaggcttgaggaagttccyctgttggagccatactttgttgaggtctgccatgaggagctagatattccgtgaggtcgcttccaacacaaacctttttatgattctgttctgttaagtggtttgatagtaacggagatgagaattaatcaaagggatatgggctacagtggaaaagtgcaacttgcacaaaagctctaaggaatctcaaagagtagtcaactattcttgtatctctgcacttaagacagttttaggggtgtatgacaatctgtatgtgatactgcttttaggaaagtctttgggacaatcaggaaagta

SEQ ID NO: 96127 - DNA, 600 bp, Chicken  19866894882692_1
tctaaactgtcttgtaaggacaaaacacactttattatagagtgccaacttaagctttcaataataatgacactaaagaagagagggagatagtttcaaagcttcaaataaatcccacataaagagcaaagcatatattctgatgttttgcttttatctaagtaccagtgcaagactatcatttttagtttgaatccatatgaaactgaacgagttggagaaaatgtatggatcctttgttgtacgaaagcattatgaagataaaattgagaaaatattctctctacattattgtatggktttttttttaaggtttacatgtaagaagtaaattgtagttcagttcacagaacatttgattttttttttttaatttttgttttaaaggatgttattactcttagagatatatagatggcaatttatgacagagatggtaacatttttattgactgcttcaagacttatgataatatgtacagtaaaactggaattatattattaaaaaggtttgactacttgggagaaatttagtacaaaaagacaatttcatttcaaaactatcatgattaattayaatttacaatgtatatttcaagt

SEQ ID NO: 96128 - DNA, 600 bp, Chicken  19866894882692_2
ataataatgacactaaagaagagagggagatagtttcaaagcttcaaataaatcccacataaagagcaaagcatatattctgatgttttgcttttatctaagtaccagtgcaagactatcatttttagtttgaatccatatgaaactgaacgagttggagaaaatgtatggatcctttgttgtacgaaagcattatgaagataaaattgagaaaatattctctctacattattgtatggktttttttttaaggtttacatgtaagaagtaaattgtagttcagttcacagaacatttgaktttttttttttaatttttgttttaaaggatgttattactcttagagatatatagatggcaatttatgacagagatggtaacatttttattgactgcttcaagacttatgataatatgtacagtaaaactggaattatattattaaaaaggtttgactacttgggagaaatttagtacaaaaagacaatttcatttcaaaactatcatgattaattayaatttacaatgtatatttcaagtaaaaactccatatttgaatgatgagtgatatcatcataatcagaatgtgtcataacaaag

SEQ ID NO: 96129 - DNA, 600 bp, Chicken  19866894882692_3
ttctctctacattattgtatggktttttttttaaggtttacatgtaagaagtaaattgtagttcagttcacagaacatttgattttttttttttaatttttgttttaaaggatgttattactcttagagatatatagatggcaatttatgacagagatggtaacatttttattgactgcttcaagacttatgataatatgtacagtaaaactggaattatattattaaaaaggtttgactacttgggagaaatttagtacaaaaagacaatttcatttcaaaactatcatgattaattayaatttacaatgtatatttcaagtaaaaactccatatttgaatgatgagtgatatcatcataatcagaatgtgtcataacaaaggctccagtcatggaggcagaagttctgtgttacaggtttcccaggtaaggttagtattctggaaaatgctaaagcttgcacaaattataaaagcacatttaactactactctttccttgcattttttctcctgacttattatattctagaaattatccttcaaattcaagttatgttattaaaatatagatgaaatatactgaagcaacagcaagaa

SEQ ID NO: 96130 - DNA, 600 bp, Chicken  19866894882701_1
gaccattagatctttccattttgatttaaaatgtgcttaaatgcattatacctcccaatctctaggatccttctgcacactcacagcatcacaaagtctgcatccaactcgctattggcccaagcagtgcttccattcaaatatcaattttagaactgtcaggtcagttggaattgacagtcagtttatggctagagaagccctacagtgtgggtagtatgaagatgccaccaaacatatatcctttcaagcatccaattggcttctaaataaataagcattacatttggaggagacaaytctatcccacagaagaatcaacacttaattagcaagctttattttagatctaagtgggatatcttttttgtaactaggaaaagtttttgtttttcctattaaggtatgtgatatcacacaaattcattgtgcccacattaagtcatatgcattaagtgctacaattttatagtgcagataaattaggaaaagcaaaagtatggaagtaagggaaattcaggttctgttgcagaattcagtgtgaattcaaacataagtaaaatgagtaacctgagagaatatcctttgggaaccagagag

SEQ ID NO: 96131 - DNA, 600 bp, Chicken  19866894882805_1
cagagagcatgtggacaccactttcagacatagggtttgggtggtgcagtgtggagccaggcattgacttgatgatccctttgatccccttccaacaggatattctgtgattctctgtcaaagcgtttggcacagtccaaaggtaacccaacacaacgttggtttgctcgcaaccataactgacatagttggggatgttgggtggaaatctcacagctttgtaaatcactgcccttctgcaagagaagaagggattagctttctctggagacccttcatatttcagtgcactgatgatgyaggacagtgtgtagctgctcagttttattctcaggctgtgagaccaagaaaactcgagaagaaattgctattagtatactgggcccatgaagactgcatttggcactctacagaccaatgtacctgtgtttgaccttaattagagactcgcatctcacttataggttggcttttgtaggacaagagtgcctcttgctcagtgccttcttgtcatactgtgttcaggactcagagtatctcctgatgactggctccccgaaaaatgcaaaaaccttttccaaacagctgatctgaacactg

SEQ ID NO: 96132 - DNA, 600 bp, Chicken  19866894882834_1
attttcccattctaaatacttcatgcccaagcacacttaatcagtgcagtcaggttgaaaaatgaaaaggatattacacaaagttgactattaatagtgagtgatttcttttagtgaaagttcactgacataaaataagttcctaattgcactgaatcaactgcttctgcacgtgtatgttactgtgtgcacaacagttataattaatgaaaaaaaaatttctcaaggaaatgttctcagcttatataaatatatgatcaatttcattattattacattaagaaataaagtctttatatmtaaaaaatgtagctaacttggctaggaaagaaagaaatacaggtgaatttcttcaagcacagagtagaaccagaagaggctagaaaagattaggaccttctgttcttttttcttctttttttaaagttgattctctgaattacaaagataaataagatccacaggaggctgatgctaataagtaaacaaaaattcagagaaatagataaaaatatagtgtattctaaactatctggttgttgttttttaaagccaatttttaaaaatctatttcattttttcaggtctttcatctcagaa

SEQ ID NO: 96133 - DNA, 600 bp, Chicken  19866894882965_1
tttcaggttgaagtgtgatgctgaattaaaaatcttgccctgggctgtctgcagggcctgcaggctactgcagtgccagcatctgccaagaagacccaggggtgctgtgtcagagggccaaagccctgggctggcaccgtgcggctgtgggggagcccagctggagggggcgggcagcactcccggcattcccacacctgatgtccccattcccagtatccccattccctgccctccctcaccccctgtgctgcacagcagggctgtgggctcggtgtgggcagggtctgcacaggggcrtgctccactcagcctggcacagacccccagctgccagcagtcccatagcaaacaatgcagcaaatgggaacattgagcatctgtgctgggcatcctctgacgatgctggttcctggcrccacagccccagcacagcagcctggagggcacaggagacagatatgggggccgacacwcagtgatggccaacccttgccccatgtgcagcacatgtccctcacacccctcctgctgctgtgagcactgtgctccgccgtggggtagggccccgtggtggctgcagggaggcacccatgtggg

SEQ ID NO: 96134 - DNA, 600 bp, Chicken  19866894882965_2
caaagccctgggctggcaccgtgcggctgtgggggagcccagctggagggggcgggcagcactcccggcattcccacacctgatgtccccattcccagtatccccattccctgccctccctcaccccctgtgctgcacagcagggctgtgggctcggtgtgggcagggtctgcacaggggcrtgctccactcagcctggcacagacccccagctgccagcagtcccatagcaaacaatgcagcaaatgggaacattgagcatctgtgctgggcatcctctgacgatgctggttcctggcrccacagccccagcacagcagcctggagggcacaggagacagatatgggggccgacacwcagtgatggccaacccttgccccatgtgcagcacatgtccctcacacccctcctgctgctgtgagcactgtgctccgccgtggggtagggccccgtggtggctgcagggaggcacccatgtgggagcacgtgggggcagatggctctgggtgctgttaaactttaacgaggtgtgtccctgcatgccacatccactgccacacagcacagtgcacgcagtccccaggtgtggagcatcttgt

SEQ ID NO: 96135 - DNA, 587 bp, Chicken  19866894882965_3
gcactcccggcattcccacacctgatgtccccattcccagtatccccattccctgccctccctcaccccctgtgctgcacagcagggctgtgggctcggtgtgggcagggtctgcacaggggcrtgctccactcagcctggcacagacccccagctgccagcagtcccatagcaaacaatgcagcaaatgggaacattgagcatctgtgctgggcatcctctgacgatgctggttcctggcrccacagccccagcacagcagcctggagggcacaggagacagatatgggggccgacacwcagtgatggccaacccttgccccatgtgcagcacatgtccctcacacccctcctgctgctgtgagcactgtgctccgccgtggggtagggccccgtggtggctgcagggaggcacccatgtgggagcacgtgggggcagatggctctgggtgctgttaaactttaacgaggtgtgtccctgcatgccacatccactgccacacagcacagtgcacgcagtccccaggtgtggagcatcttgttctggcttattctttccctgaggtccatgaagaaaatccagtttt

SEQ ID NO: 96136 - DNA, 599 bp, Chicken  19866894882982_1
  misc_feature (1)..(34): n is any nucleotide
nnnnnnnnnnnnnnnnnnnnnnnnnnnnnnnnnnacttcctgggagagaatggaacagggaaaatgagaactttaaatacgatatttagaaagaaaaaaaagattaaatagcatttcctatggaacaaaaagagtactttctctgagatggtatcgctgacaatttcagatttaatgaaaaaattatcttcactcagggaagaattgttctttctttcaaggcttcctcgtgtcttcctaattataactcataatttgctgcttgaaagacatggtcaagataatagactgtgcataatyctgcttcatcagaataagtcagtgaaaacaatggggatgatcctgtcttcatgaatggtgtgtctagacgaatgttatcatactcttttctagtttttccaaatagatagttcagacaagaaggcaagcaatggctttcaatcacaagcacaattyttagagagccctgctcctgcaagccagaacctggacttcagaagctgaccagattgagtctggagccccaggaaargaatggaaatattaggtgtctaaaaagtacaatccagcaaattaaaagatgtcagatgtacagagaa

SEQ ID NO: 96137 - DNA, 596 bp, Chicken  19866894882982_2
ctgacaatttcagatttaatgaaaaaattatcttcactcagggaagaattgttctttctttcaaggcttcctcgtgtcttcctaattataactcataatttgctgcttgaaagacatggtcaagataatagactgtgcataatyctgcttcatcagaataagtcagtgaaaacaatggggatgatcctgtcttcatgaatggtgtgtctagacgaatgttatcatactcttttctagtttttccaaatagatagttcagacaagaaggcaagcaatggctttcaatcacaagcacaattyttagagagccctgctcctgcaagccagaacctggacttcagaagctgaccagattgagtctggagccccaggaaargaatggaaatattaggtgtctaaaaagtacaatccagcaaattaaaagatgtcagatgtacagagaagcagttaagactgtatcagggaagcaagggcacattggagagctgtagtctgccttatttctgtagggaaatactgagcttctggaaaatcctgtcttcactgaatttgtttctgcagaggggttaatgtgtggatatatagtgcacccccat

SEQ ID NO: 96138 - DNA, 520 bp, Chicken  19866894882982_3
tcttcctaattataactcataatttgctgcttgaaagacatggtcaagataatagactgtgcataatyctgcttcatcagaataagtcagtgaaaacaatggggatgatcctgtcttcatgaatggtgtgtctagacgaatgttatcatactcttttctagtttttccaaatagatagttcagacaagaaggcaagcaatggctttcaatcacaagcacaattyttagagagccctgctcctgcaagccagaacctggacttcagaagctgaccagattgagtctggagccccaggaaargaatggaaatattaggtgtctaaaaagtacaatccagcaaattaaaagatgtcagatgtacagagaagcagttaagactgtatcagggaagcaagggcacattggagagctgtagtctgccttatttctgtagggaaatactgagcttctggaaaatcctgtcttcactgaatttgtttctgcagaggggttaatgtgtggatatatagtgcacccccat

SEQ ID NO: 96139 - DNA, 600 bp, Chicken  19866894883121_1
cactatatgattttctgaagtgcactacactagacaacagggctctcctcaaactggcatactctgctgcatgtggtctgtgccatttacacacagaaatctatgggacgcaaggcaagcctgctatagcacacagggacctgaaaagtaaaaacattttgataaagaagaatgggacatgctgtattgctgacttgggtctcgcagtcaagtttaacaggtagataagcaaatcttctgtaataggaaaaaaaattggtgttcttttaatgcaccagatatccagtttaaaaagagacrctgagtcgtttagttgtgctttttcagggatatttttgttggtttgttttgaggttaaaatagaatgaatccttggaataccggtaagcatcaaggtaacaacaggttaagaagcaaacaaagaagaaaacccttatttgtggaaagtagcaataattttttagaggaagaaaattaattcgttactcaaaattgacctttcatgctaactgctattatctagttctgttataaatgacctcacagaaaacatgaacagtgggaagggatttgaaactaaatggtgaaaataatattgtg

SEQ ID NO: 96140 - DNA, 599 bp, Chicken  19866894883170_1
  misc_feature (1)..(35): n is any nucleotide
nnnnnnnnnnnnnnnnnnnnnnnnnnnnnnnnnnnttaaggttggaaaagaccccttaggtcacccagtccagccatcagcccaccccaccacgcccaccaaaccacatccctcagtgccacacctccacgtgccttgaagacctccaagggaccgtgactccaccgttcttaacacccggacctgaacctcccccggcgcaaccggtggccgttacctcccatccacaacgccagcgttctcccttccagccctcaccaaccttcaatgcagcccaacagcagcagggctcctgcagcyccagccagccagctcctcccccatgcccgaggctcaatggagcacagtgctcagatggactgacccaacactactctgcaaaccccagtgctgaggtttccgctgcagacaagcaaccacctttcacgtttctggggaaaaaacaccatttcataacttcccctttttagtttctttttgctgtttccccggggcctgctagaccagctcggtgtggacctgaggtttgtatgttatamgttgacacgtgtggggtctgctccaaaaagtaatgcctctcattctgtggcgctgaccca

SEQ ID NO: 96141 - DNA, 600 bp, Chicken  19866894883170_2
tctcccttccagccctcaccaaccttcaatgcagcccaacagcagcagggctcctgcagcyccagccagccagctcctcccccatgcccgaggctcaatggagcacagtgctcagatggactgacccaacactactctgcaaaccccagtgctgaggtttccgctgcagacaagcaaccacctttcacgtttctggggaaaaaacaccatttcataacttcccctttttagtttctttttgctgtttccccggggcctgctagaccagctcggtgtggacctgaggtttgtatgttatamgttgacacgtgtggggtctgctccaaaaagtaatgcctctcattctgtggcgctgacccacagacctcagaggcggatgttggtggtatggcagcagaggttggaacttccccaccaatattctcttacagcacaaaatgtagagcacatcggtctgctcacgcagtggattaacaccaaggaactgcatacagagctgaatatcagcttcagtgtgtgggaatcgatggcagcaacgctgggacatcacagtgtttgcaccaggtgggtcccacaaatgctcacgcagcaacccaaggc

SEQ ID NO: 96142 - DNA, 599 bp, Chicken  19866894883198_1
  misc_feature (1)..(5): n is any nucleotide
nnnnncccagagatgcataaaggtttgggaggcaagcaaaaagccattgagttttgtccaaatattggtggtaaaccacttttacaacagcagtacaagcaggttctcctgagcctttgccttgcaataaaacatgtgagcacatgaactccaaccaagagcccttacccatgtccaaccagcagacccacactccttcatccgtggccagaggataagccatgcatgtcctgatgctctccctctctcttcccatcagtggctcctcctgaaaacctgcgtgtgacagggatcagcgayggctccattgagctagcatgggacagcccaggagcagccactgagtacgtggtatcataccagccagcggggccagggggatcccagctccagcagcgggtgcctggggactggagcaccatcaccatcacggagctggagccaggtgttgcctacaatgtcagcatctacgcagtcatcagcgatgtcttgagcagccctgtcaccaccaaggtgacaaccagtaagtatctgcctgcacttgtcacttggtaccacaataaccagaggtgatgctcatcagatggctgcagaagcca

SEQ ID NO: 96143 - DNA, 600 bp, Chicken  19866894883328_1
ccatctccgagttgtgctgcagcccaccctgatgggctgaacgtatcctggtgtaggtactgtttgtccgtatgtcaggagagactgctgcagatcttccctgggattagtcagagaatgtgggagagagaattgtgtgagaatgcatcctccccatctgcagtgtgtttgaccacgggagcagctgaagcagccaaagatcacaacctgcagggctgtagaactcaacagcacaaaagcttaacccttcatcagctgctcactattgcaggaatgtgaattcagcaccaagttttcatrgaggggaccatctccaaatgttgcttattggctaaaagtcaacaagaagataggatatgctgtactggagtagatattaactagagtatccccagctgggactcagaagaaccattgagtccagctcctggctccacacaggaccacccgacataggatagcaaccagcacarcaattggagattttccctgcacacccagattgaattttccatttccagaaggaaagttcagatttcctcattggaactgaactttgcagttcatgaaggaagcgccactctgagggatttgttttac

SEQ ID NO: 96144 - DNA, 600 bp, Chicken  19866894883328_2
cacgggagcagctgaagcagccaaagatcacaacctgcagggctgtagaactcaacagcacaaaagcttaacccttcatcagctgctcactattgcaggaatgtgaattcagcaccaagttttcatrgaggggaccatctccaaatgttgcttattggctaaaagtcaacaagaagataggatatgctgtactggagtagatattaactagagtatccccagctgggactcagaagaaccattgagtccagctcctggctccacacaggaccacccgacataggatagcaaccagcacarcaattggagattttccctgcacacccagattgaattttccatttccagaaggaaagttcagatttcctcattggaactgaactttgcagttcatgaaggaagcgccactctgagggatttgttttacactgactgcccaccaggaatacactgtgaaaactgggtttgaaatgggctgtgtgaattattccttctcaaattcagagtgtcaaaaacaccttaaaccactcagtgtttggtcaatagacatgacctggaattcctaatctgctggagataaaccaagttaataatcaatcc

SEQ ID NO: 96145 - DNA, 600 bp, Chicken  19866894883344_1
tatctgtccaatactgtaacagaaacgattcgcatcagtggcctctgggagatactgctgagtaggataggggacgacgtgatgatgtacctgctggagcactgtgcactcttcatgctggttcccccaagtaactgttaccaggtctgcgggcaaccaatttatgaacttatttcgcgtaacgtagggccatccccagggtttgttagacgacggtactcaaggtttaaacataatagcttgcttgactatgtgcgaaaaaggcttgtgtttcacaggcactatctttccaagtcgcartggtggaagtgcaggccgagacgtcgaggtcgtgtctccagcaggagaaaaagaaggagccataggatacaaagcctaaggtctggttatcagccttctgcaaaagtgaactttcaagcaggtaggcagatcagcacagttactgcacgtctggaaaaacagagctgctccagtttatgtttgccagctagagcaccatctttaaaaaggaagcgtgatggagaacaggttgaaatcacagctaagagagtgaaartaatggagaaagagatagaggaacaggcttgtagtatcgttcct

SEQ ID NO: 96146 - DNA, 600 bp, Chicken  19866894883344_2
gaaaaaggcttgtgtttcacaggcactatctttccaagtcgcartggtggaagtgcaggccgagacgtcgaggtcgtgtctccagcaggagaaaaagaaggagccataggatacaaagcctaaggtctggttatcagccttctgcaaaagtgaactttcaagcaggtaggcagatcagcacagttactgcacgtctggaaaaacagagctgctccagtttatgtttgccagctagagcaccatctttaaaaaggaagcgtgatggagaacaggttgaaatcacagctaagagagtgaaartaatggagaaagagatagaggaacaggcttgtagtatcgttcctgatgtaaaccaaagtagctcccagaggcatggaacctcctggcatgtagcaccacgtgctgtaggtcttattaaagaacattacatttctgaaagaagtaacagtgagatgtctggtccttctgtagttcacagatctcaccctgggaagaggcctgtggcagacaaaagctcttttccacaaggagttcagggtaacaaacgcataaagaccggtgcagaaaaacgagcagaatccaatagaaggggcatagaga

SEQ ID NO: 96147 - DNA, 513 bp, Chicken  19866894883344_3
agagatagaggaacaggcttgtagtatcgttcctgatgtaaaccaaagtagctcccagaggcatggaacctcctggcatgtagcaccacgtgctgtaggtcttattaaagaacattacatttctgaaagaagtaacagtgagatgtctggtccttctgtagttcacagatctcaccctgggaagaggcctgtggcagacaaaagctcttttccacaaggagttcagggtaacaaacgcataaagaccggtgcagaaaaacgagcagaatccaatagaaggggcatagagatgtatataarcccaatccataaacccaatagaaggggcagagagaggcrtataaatccaacmcacaaacctgagttgaattctgtacaaactgaaccartggaaggtgcttcttcaggggacagaaagcaggaaaatcccccagctcatttggcaaagcagttaccaaatacattctcgcgctctacagtgtactttgagaagaaatttcttctgtattcccg

SEQ ID NO: 96148 - DNA, 474 bp, Chicken  19866894883344_4
aaaccaaagtagctcccagaggcatggaacctcctggcatgtagcaccacgtgctgtaggtcttattaaagaacattacatttctgaaagaagtaacagtgagatgtctggtccttctgtagttcacagatctcaccctgggaagaggcctgtggcagacaaaagctcttttccacaaggagttcagggtaacaaacgcataaagaccggtgcagaaaaacgagcagaatccaatagaaggggcatagagatgtatataarcccaatccataaacccaatagaaggggcagagagaggcrtataaatccaacmcacaaacctgagttgaattctgtacaaactgaaccartggaaggtgcttcttcaggggacagaaagcaggaaaatcccccagctcatttggcaaagcagttaccaaatacattctcgcgctctacagtgtactttgagaagaaatttcttctgtattcccg

SEQ ID NO: 96149 - DNA, 461 bp, Chicken  19866894883344_5
tcccagaggcatggaacctcctggcatgtagcaccacgtgctgtaggtcttattaaagaacattacatttctgaaagaagtaacagtgagatgtctggtccttctgtagttcacagatctcaccctgggaagaggcctgtggcagacaaaagctcttttccacaaggagttcagggtaacaaacgcataaagaccggtgcagaaaaacgagcagaatccaatagaaggggcatagagatgtatataarcccaatccataaacccaatagaaggggcagagagaggcrtataaatccaacmcacaaacctgagttgaattctgtacaaactgaaccartggaaggtgcttcttcaggggacagaaagcaggaaaatcccccagctcatttggcaaagcagttaccaaatacattctcgcgctctacagtgtactttgagaagaaatttcttctgtattcccg

SEQ ID NO: 96150 - DNA, 424 bp, Chicken  19866894883344_6
gtgctgtaggtcttattaaagaacattacatttctgaaagaagtaacagtgagatgtctggtccttctgtagttcacagatctcaccctgggaagaggcctgtggcagacaaaagctcttttccacaaggagttcagggtaacaaacgcataaagaccggtgcagaaaaacgagcagaatccaatagaaggggcatagagatgtatataarcccaatccataaacccaatagaaggggcagagagaggcrtataaatccaacmcacaaacctgagttgaattctgtacaaactgaaccartggaaggtgcttcttcaggggacagaaagcaggaaaatcccccagctcatttggcaaagcagttaccaaatacattctcgcgctctacagtgtactttgagaagaaatttcttctgtattcccg

SEQ ID NO: 96151 - DNA, 600 bp, Chicken  19866894883413_1
atttttatgatctgaaagatgagaggtgaaatttgtgtctgtgggttactttgggcacagagagaaactgtgacagtgtttgaaactagtgagaaaggggaatgtccatgtcttgcagagacttcaagttcaagagtttcctatgatttgcataaagccagacttttgcttttgcaagtcttgataaaaaagaacaatggagtacaggaaagagtgtatgtaaaatatagatggcggaaatcagtagcaaaacaagtaatttgttttggaataaaacctagtcattctcatgtttctgckttacattgaagcatgtatactaaatatgctgtgtttcttttgcagattctgtctgggggccgagtcctggtgttgacaagtgctcagataagtgacacaggaaaatatacctgtgttgcagtgaatgctgcaggagagagccaaagagatatagatctcagagtttatggtgagattttctgacaattttttttttgaatgaggaaaactgttcgtggagctttagtggtccaaatgtttagtaacattgaagaaaagttgttccaacccataatgaaatccaaatagatcaggaggtat

SEQ ID NO: 96152 - DNA, 599 bp, Chicken  19866894883423_1
  misc_feature (1)..(10): n is any nucleotide
nnnnnnnnnnaattgagacgcaattgcatccctggatagctcaagctcaatgcagttgctcaaatatagatgtttagcatctgttgagatttctcagtgtttcttgtctggtctacagttgctacaccagaaggacataaatttcctgtcaaacttgggttgtgtttgctagtccactgcagaagacatctcaaatgtcccgagaagccatttgcaccaactgttttggttggtgagcaattgaaacaggcccagtggcatcagtcagtagggaatggaaagttactcatatctaggtayatttcctcctgtgttccccaacttttccagtgctgagccattagggtgactgttgtaactgcaactctgtttgctaacttcttgggcatgaccgtcttccttctctcaatgttctactccctcatgaattagctgaatattccaattccaaaaccacagctgtcagtacccatccgatgaaataaaagtgataataaactctcccatatgccaagccagctgaggaaagcggtactgttcctgtcaaagagaacagctggagggaatattgatttattttgtcatttcttggataaaag

SEQ ID NO: 96153 - DNA, 600 bp, Chicken  19866894883431_1
cattgtatgtatggggaggagattggtaggaaacaggacaatgctgagatcttgcaggtattcagagcctgcatccacaatgagcgttggtgtgggcaaataagatgctcagcaaaagatgtcattgtagcaacaatcatgtttgtgccaaatggatatatggctcccatggagcaggaaaggataagctattaggcaggtgagccaagaaagtgtgtggggaagggctggggaacagagggtagatgaaacgatggggcagtagaggtgctgcaaggaacaggatgtgaggaaacagcmcaagaaaagaaaacagaagtggcaaaagtccctggcgtgctttctcaggcctgctggctgcagagattcccctggacaataaaaaaaaacagtccattgccatctcatcaaagagaatttcaagtcaagagaggtcctcccataccaaccagaggcatcagggacagtactgtttgcatgagaacatggccccattttctctcttcacagcagccatcccactgttgttcatccgccctcacagacagcagttgggatgcctccatttctacagagcagacagaaagatttggtggagaa

SEQ ID NO: 96154 - DNA, 600 bp, Chicken  19866894883733_1
cttcagagtagccactgtacatttcctaaaggaagggtaaaaggctcattaaaacaccagaacatatacagatgccaaatgttatataccaagagtgaggcagaccacaataagactgccccagtcctctgtgacctgaccttttgcagcagtctgaagctccgctgaccagtgatttctgggctgattcaccgaccagaagctgctacagagaactgtaagaacaaggtatgttttcaccgaataaagccgcattctcaaatgaatccaactaagcagctcagactccagcagaagtaygcagctcctgcctcatcacataccaccacacgcaccatacagtaagccatttgagaggccagcgcctgtcctcaaactcagtgtattttccctagttggaataccaatgtctctcaaggagagctacaccaactcaaactgaaattgcaattgtgaagtgagtttgtgaaatcattagacttgccctatatggaaggtcagactagattgaagatcggatttctacacaaaaagagtctcatttttaaattcctgtagtcttgatgctgtcagtggtgataatgcatgtgtggcactgca

SEQ ID NO: 96155 - DNA, 600 bp, Chicken  19866894883764_1
gaaaagtacatattttgctttttaacagcagtactcacaaggaattaggtaactcaatatgtgtattcaagttgaattttaaaaatggctatgagttttgtcaccctcctttctgagagagtggggctataaaggagtattgtatgctagcttctcatttaatcttaatctgtattgcttttcatttagatcatgatattttatttattctgttgtctgtgatctgtgattccttattagaaaagagaacagctgccagctacgtagcaggagttgactctgcatctgccttctgctcarctacactgtgacagcgagtagaagtatacatatgaacattaagtgcttttaaagtccatctgtacaacaaatttcactaggctgtacagaaatatgtacttgttagcatctgctactagttaactttacaatatggattatcagtagcaatttcaaataattaggtttttcttttcaaataaacttactagacaaagttaagtggaatgaagaaaggataaactaggagaagctactagtagattaaaagaggaatatgttgccattttagttaatgctagtgcagtaatgataagtctg

SEQ ID NO: 96156 - DNA, 599 bp, Chicken  19866894883794_1
  misc_feature (1)..(106): n is any nucleotide
nnnnnnnnnnnnnnnnnnnnnnnnnnnnnnnnnnnnnnnnnnnnnnnnnnnnnnnnnnnnnnnnnnnnnnnnnnnnnnnnnnnnnnnnnnnnnnnnnnnnnnnnnnattgcggttatattgttaatgttctcagaggacaagggctttcctagcaaactaaataaactgacatttaggtaggactggtaactaactctgccaaaaaaatcgtatttgtctgccttgctttcagaacgaaacagaggagatactctacaggcaggatatcagatgtctcacttagtttctttttttgcgtrtttgttttcatccagcgaagttacaggagaactgaaactctcagaactgtacgaagctttatgatgtacgggtaattttatctgttattctgtctttatgaatgaatggcaaaatgaagatattcatatgggattaaaaaattcaactcactaccgtcaccactgcaattccatgttggaataaacaaagaatcatcattatagcataaatacagagatgtagagactactacttgttcaacgaaggggaggtggactagatgacctttaaaggttccttccaactctaaggattctat

SEQ ID NO: 96157 - DNA, 408 bp, Chicken  19866894883915_1
ttctatcttgaccagtttggctcccacatattcctgtgttgaactgaatcaatttcacacttactcacctccctgtctctctgatgtggtttattcattggtttgatattgccatagcaactctgcaacatggtaacatgctattcaagcaatgctgctcacctcccagcgtatggtgagagcagctatagtcgcctgatacacatgggtttatattataatgtatattgatttctgattcctgctattagcaaactgttttaatgttaccatttctatctccgtatctagcaaccatcyatcttgaccttcatagtagttaatctgtagtggtcttagcttcactatacaaatcagctcccatctcagatttaaatccaggatatattttggactctaaattccaaa

SEQ ID NO: 96158 - DNA, 599 bp, Chicken  19866894884087_1
  misc_feature (1)..(31): n is any nucleotide
nnnnnnnnnnnnnnnnnnnnnnnnnnnnnnntgaagtgctgtgaatgttattttgtcttatggtggatgagtgatgcctgtactcagaggtgatcctatgctagaacaaaacctgattacccattaacctggtctagatcagtatctgttttgtgtgtggcaggtatgtaatgctagcactctaacctttctgattctggacactaatacttattctcccaaggactgtacgtatgctgcaggtgattgggaaacatgcatgaaatctgaccacctctaaatccatctgtaagcggaggragtacaaatattcagacctcttcatagtatgattcaaaccaccttccagctccaggtaacaatgagggattataaacttgtttagacacccttgtgacacagcaaacccttattatgctgatgccaggttttatttgtagtttccccatctgcagctgtttagctgttctgtttgtgagggggatgctgctggctttgcagcctctttatcatcgtgcctttaaatctctttaagattgtgttgcaaaatcccacctgatgtgggagaggagcaacgctgagcatggattggaaagcag

SEQ ID NO: 96159 - DNA, 600 bp, Chicken  19866894884130_1
tcatcacagatctgaaatgtaacaatataaagctactacaaagacattatctctatcctagccaaaaccagtacacctgtaaagtgcaagctgaaatattaacttaagagaacaccatagaaacaaatgtatggctaattaatctcccgttttcaccttagaaatacaaatatgaataagacttagaaaagaatataagataggcagatatcccatatgaaaaccaatttctgttcctaggcaaactcaggggaaaaaagcttaagtttgggggtggggaaaaatctgtttcttgtcacrgaattttgtttttgggggtggcagattggttaattcagctttagttagtgctttattattctgcaaaaatactattttgtataagttacttataagttgtgctgaaataattgctcagactgaatcaacaaataagtcttcgaatcacttgaaatcagcaaaggaaataatcttagtggaaagggagacatcagataaatctctggtatgcggtagttgcgccaggagcaggagtgtgctgtgaactggagatgcatgctcacagcagctcacctgtcaagctccagaaaaagcctggga

SEQ ID NO: 96160 - DNA, 600 bp, Chicken  19866894884206_1
tcacatgagatatgagctaagtgaaattagttccagacaagcctagcccagggaaaagggcctataggtgggtttgacccagaacaatgctgctcagctgcttatctttgaggctgtgaatagaaggccagatttaactctgaggcagaaccaggcaacacatatccagataatgtctgcggcaccaaaaacttgactaggtttaagaaggactatgttaaatgcataaaactggttctgtagtatggtagtagttgagaacacagtcattgatttacaggcgtcttcccgtgttcctayagctattgcagtggtattgcagtctacacatgagtaaatcaaagagatggaagcatgaatgacaataaagaaaaccaggctggtgcaggcatgtattattgcacagaaattcctttaggttcatgtttaatatcatagatctaggtacttttctgttcagcagctattgaagctggggagctcaccagcttctaagcacttcattgatcctcagtgatgggacttggaggggaaaaaaaaccaaaacattaaaaccctcacgcagcacaagaagcaattatcttactgcagcagagaatg

SEQ ID NO: 96161 - DNA, 600 bp, Chicken  19866894884240_1
cactgccatcagaacaatgcagcagtatgaagcatacaccaaacgtgatactgatgagctttgcaacttaatggcttgtcttaaaaaggggggagcagagcagagaatgaaagcccgtgctcactgcatttacagcaggttcagaacgccgagccttccccgttcttctaattgtgctgggcgttatgcatgctagggacggagtgagaagagttgtcagcccacctgactgcagaacaaagagcatttttttcttacagcatttgttactgatgcttgagccacacccttcagtcctcrccaagcgcactccttacactctccttcttcctactcattttctccactgaaataagatattagggattctcatgctcgggaactgctgcatttgggtggcacttggaaaccccctccccgtgtgtgtggaaggaagggatggggctccaaaccacactgtgcttgggcagcacagggagccctgtgcaggaaacaaggagccccttgggatggggctcagcctccaggggtggctttgcagtagggtgattaaccctgggttgagagggtggagaggaagagcctcaaagcaaacaaatg

SEQ ID NO: 96162 - DNA, 600 bp, Chicken  19866894884277_1
tttgtgaattgttgaagatatttatggtaaagcagattagaatttgttacaaaggctgaggaaatccacacatagtcaaattaagaaatacacagattcaggaagaagtgcaaaatctcaaatgtcaaatgaccttattatgtttgtcttaactacatgtatgtctgcatttcttaaatacatgtatgtattcaggaatttatgtaaactgtatttctagaaaataatctattttcagctaattcataaatgaaaaggagtttttctgaattaagtagtatgatttccttaagttttttkatagtgacatttctgatttgcaaggaatgttgcaataataaaagtgttttgccatattggcaaaggagattaaaattagtttagatgtaaacctacctgcaatcagaaagtagaattattttggaattccagcaacagatgtctttaagaacaggttgtaaacatatgtttgcaaatacaattcattcactcagtgttaaggatataaatcattctcttctgtctgttttttctaatgttggttcacagaaaatgaaattctgttacaagaatatttctttactatcccagtagtatgat

SEQ ID NO: 96163 - DNA, 600 bp, Chicken  19866894884526_1
aggttgggagtggggaacgctgcccttgtgcaacttaaaggcaatatgtatttaaaatgatttggcagtcctgtgctgatagtgaactgcgctgatgccctgatggatgactacagattacatctatcatccgcgggattctttgaactagttgatggtgcacagtaatcatagaatggcttagtttgaaagggaccttaaagatcattgagcttcaatctccctgccacggggagagctgccacccagcagctcaggctgcccaggaccccatccaacctggccctgagtgcctccagygatggggcacccacagcttctctgagcaacctgtgccagtgcctcatcactctctaagtgaaaatttcccactgacatctaatctcaatcttccatcttttagtttaaaaccattcctctttgatgatcatctccctcaccctactggccctctccctactgatgcagttctggatgctgttggccttctgggttgcaagtgcayactgctggttcatgcccagcttttcatccaccagaacccccaagtccttctctgcaagctgttctcaatgagttcttctcccagtctgcagacat

SEQ ID NO: 96164 - DNA, 418 bp, Chicken  19866894884526_2
cattgagcttcaatctccctgccacggggagagctgccacccagcagctcaggctgcccaggaccccatccaacctggccctgagtgcctccagygatggggcacccacagcttctctgagcaacctgtgccagtgcctcatcactctctaagtgaaaatttcccactgacatctaatctcaatcttccatcttttagtttaaaaccattcctctttgatgatcatctccctcaccctactggccctctccctactgatgcagttctggatgctgttggccttctgggttgcaagtgcayactgctggttcatgcccagcttttcatccaccagaacccccaagtccttctctgcaagctgttctcaatgagttcttctcccagtctgcagacatatctggggattgcccagacctag

SEQ ID NO: 96165 - DNA, 599 bp, Chicken  19866894884665_1
  misc_feature (1)..(171): n is any nucleotide
nnnnnnnnnnnnnnnnnnnnnnnnnnnnnnnnnnnnnnnnnnnnnnnnnnnnnnnnnnnnnnnnnnnnnnnnnnnnnnnnnnnnnnnnnnnnnnnnnnnnnnnnnnnnnnnnnnnnnnnnnnnnnnnnnnnnnnnnnnnnnnnnnnnnnnnnnnnnnnnnnnnnnnnnnnncgggaagcataggctgagttctaagacaaataaagatattcataaaaacaattaaatggtgccctgcattttctgcaaaccttcaggtggaacatatgaggtcagcagcaggaggggctgctggcagcragtgtggggctatgccgtgagcagctgtcagatggcaaaatcattactcatcaggggacttcagggaggttttgttttcacagggttctgtggggtctaatagctcttcacgagatgccctgtgccaagacaggtttcacctatttcctcacagcagccctacctcaaaatacttgcactatgagtggctggaagggcagcagaaacagcccttcctgggctggaatgacacggtttaaagataggccagtgtgggagagcccccatctcttccatccagctgtaccatgtactgtggg

SEQ ID NO: 96166 - DNA, 577 bp, Chicken  19866894884665_2
ggttttgttttcacagggttctgtggggtctaatagctcttcacgagatgccctgtgccaagacaggtttcacctatttcctcacagcagccctacctcaaaatacttgcactatgagtggctggaagggcagcagaaacagcccttcctgggctggaatgacacggtttaaagataggccagtgtgggagagcccccatctcttccatccagctgtaccatgtactgtgggatgccacacaagagaggaaggagcacagtccagcttaggactgaactgctctctagaaatgccagctstctctgggagggggggctgaggggaggcctcatagcagcctacatctcctcagaagggtcgcggaaggacagcgctgagctctgctctctggtgacagcagtaggatcagagggaacggcatggagctgtgtcagggggagggtctggtggatgttaggggaaaggttcttcaccagggggtcgtcaggtgtggaacaggctccccagggtcatggccccaagctgccagagttcaagaagcatttggacaatgctcttggacatacagtctgattt

SEQ ID NO: 96167 - DNA, 599 bp, Chicken  19866894884695_1
  misc_feature (1)..(75): n is any nucleotide
nnnnnnnnnnnnnnnnnnnnnnnnnnnnnnnnnnnnnnnnnnnnnnnnnnnnnnnnnnnnnnnnnnnnnnnnnnncaacaaagcctcctaaccgcgccgaggccacgggagccaggtgggaccgcagcactgcgtcccaaaagggcctttgggacagagctgggctatgccctgagctcagagcccctcctcgggcatggggcacccacaggacactcacctggcaccaacacacattttgaaagccacatacaggtcctttgcggctgcgccccattgacaccacgctgccttgggcaycmgccraggggaccttggtgaaaaccagccccaggatggctctctcccacccttggaggagctttgtgcattcagcccccagcacaacccggtgccacccacagaagctgcattttgagcagtamccggaaagcagggtactttgagcagctcctggaraggtcccagattgagcccagagcaaatcctgcctgatcaggcacagcattaactcagtccgtcttctcaccctcccaaaaacaacctctcagccaagccgtgcatgcacacctgagaggaactgcaggcttgggtctaac

SEQ ID NO: 96168 - DNA, 599 bp, Chicken  19866894884695_2
  misc_feature (1)..(73): n is any nucleotide
nnnnnnnnnnnnnnnnnnnnnnnnnnnnnnnnnnnnnnnnnnnnnnnnnnnnnnnnnnnnnnnnnnnnnnnnncaacaaagcctcctaaccgcgccgaggccacgggagccaggtgggaccgcagcactgcgtcccaaaagggcctttgggacagagctgggctatgccctgagctcagagcccctcctcgggcatggggcacccacaggacactcacctggcaccaacacacattttgaaagccacatacaggtcctttgcggctgcgccccattgacaccacgctgccttgggcaycmgccraggggaccttggtgaaaaccagccccaggatggctctctcccacccttggaggagctttgtgcattcagcccccagcacaacccggtgccacccacagaagctgcattttgagcagtamccggaaagcagggtactttgagcagctcctggaraggtcccagattgagcccagagcaaatcctgcctgatcaggcacagcattaactcagtccgtcttctcaccctcccaaaaacaacctctcagccaagccgtgcatgcacacctgagaggaactgcaggcttgggtctaaccc

SEQ ID NO: 96169 - DNA, 599 bp, Chicken  19866894884695_3
  misc_feature (1)..(69): n is any nucleotide
nnnnnnnnnnnnnnnnnnnnnnnnnnnnnnnnnnnnnnnnnnnnnnnnnnnnnnnnnnnnnnnnnnnnncaacaaagcctcctaaccgcgccgaggccacgggagccaggtgggaccgcagcactgcgtcccaaaagggcctttgggacagagctgggctatgccctgagctcagagcccctcctcgggcatggggcacccacaggacactcacctggcaccaacacacattttgaaagccacatacaggtcctttgcggctgcgccccattgacaccacgctgccttgggcaycmgccraggggaccttggtgaaaaccagccccaggatggctctctcccacccttggaggagctttgtgcattcagcccccagcacaacccggtgccacccacagaagctgcattttgagcagtamccggaaagcagggtactttgagcagctcctggaraggtcccagattgagcccagagcaaatcctgcctgatcaggcacagcattaactcagtccgtcttctcaccctcccaaaaacaacctctcagccaagccgtgcatgcacacctgagaggaactgcaggcttgggtctaaccctcca

SEQ ID NO: 96170 - DNA, 600 bp, Chicken  19866894884695_4
agcactgcgtcccaaaagggcctttgggacagagctgggctatgccctgagctcagagcccctcctcgggcatggggcacccacaggacactcacctggcaccaacacacattttgaaagccacatacaggtcctttgcggctgcgccccattgacaccacgctgccttgggcaycmgccraggggaccttggtgaaaaccagccccaggatggctctctcccacccttggaggagctttgtgcattcagcccccagcacaacccggtgccacccacagaagctgcattttgagcagtamccggaaagcagggtactttgagcagctcctggaraggtcccagattgagcccagagcaaatcctgcctgatcaggcacagcattaactcagtccgtcttctcaccctcccaaaaacaacctctcagccaagccgtgcatgcacacctgagaggaactgcaggcttgggtctaaccctccaagtcccagagctggatgggaccagagccagacggggtgggtcacatccatcccagcaactcagctgatggcagtgccaggagcagcctggccccgaccacacaccaggctcagctccttg

SEQ ID NO: 96171 - DNA, 600 bp, Chicken  19866894884695_5
ctgggctatgccctgagctcagagcccctcctcgggcatggggcacccacaggacactcacctggcaccaacacacattttgaaagccacatacaggtcctttgcggctgcgccccattgacaccacgctgccttgggcaycmgccraggggaccttggtgaaaaccagccccaggatggctctctcccacccttggaggagctttgtgcattcagcccccagcacaacccggtgccacccacagaagctgcattttgagcagtamccggaaagcagggtactttgagcagctcctggaraggtcccagattgagcccagagcaaatcctgcctgatcaggcacagcattaactcagtccgtcttctcaccctcccaaaaacaacctctcagccaagccgtgcatgcacacctgagaggaactgcaggcttgggtctaaccctccaagtcccagagctggatgggaccagagccagacggggtgggtcacatccatcccagcaactcagctgatggcagtgccaggagcagcctggccccgaccacacaccaggctcagctccttgagatgcaaaacccagggcagcgtgaggcagggca

SEQ ID NO: 96172 - DNA, 600 bp, Chicken  19866894884725_1
gctgcgagtgcctagctagcactgggacaatgctttcttccaaaagatgtttttcctagagcacgtaacactgcagtaggaacaagggcatctcctaccttggaactggagctgcagcacgtactggtagagatgagacagggataaccctccctgggatacaaggaattcataaggcaaacggagcggctttttactgacatctatccctctccctgcctctgggagataaagcagaggagagcaggcaagcacagtgcagtgctggaagccagagagaagcacaccaggactggaggraaactgcttcagtgtggaaaggagactaccaccgctgtaagtgcaggacagacaggcaggaaaaataggagcagcttagggatacaaggagtgacaagaatttgagctaaagcagtgaagagatctgtaagcaacagacttmrgtaaaggaagggagacaaggacagtgttactgtcagaagtgtacaaagttgcccagaggacaggcttggggccaggcagaaagaagggttttgaagatgaggagcctgaacagcagagcaggtggagatgggcttgggatgggatcttcatgtatag

SEQ ID NO: 96173 - DNA, 600 bp, Chicken  19866894884725_2
gataaccctccctgggatacaaggaattcataaggcaaacggagcggctttttactgacatctatccctctccctgcctctgggagataaagcagaggagagcaggcaagcacagtgcagtgctggaagccagagagaagcacaccaggactggaggraaactgcttcagtgtggaaaggagactaccaccgctgtaagtgcaggacagacaggcaggaaaaataggagcagcttagggatacaaggagtgacaagaatttgagctaaagcagtgaagagatctgtaagcaacagacttmrgtaaaggaagggagacaaggacagtgttactgtcagaagtgtacaaagttgcccagaggacaggcttggggccaggcagaaagaagggttttgaagatgaggagcctgaacagcagagcaggtggagatgggcttgggatgggatcttcatgtatagatgaagagagctgaatggaaatctgcagttcttgcaaagggagagcatggtaccaggagatgcctctgcccatgtagcaagcaaaagagcaatatatgatccagggcacaagggacagcagaaatgtcactgttcagtatca

SEQ ID NO: 96174 - DNA, 600 bp, Chicken  19866894884725_3
ataaccctccctgggatacaaggaattcataaggcaaacggagcggctttttactgacatctatccctctccctgcctctgggagataaagcagaggagagcaggcaagcacagtgcagtgctggaagccagagagaagcacaccaggactggaggraaactgcttcagtgtggaaaggagactaccaccgctgtaagtgcaggacagacaggcaggaaaaataggagcagcttagggatacaaggagtgacaagaatttgagctaaagcagtgaagagatctgtaagcaacagacttmrgtaaaggaagggagacaaggacagtgttactgtcagaagtgtacaaagttgcccagaggacaggcttggggccaggcagaaagaagggttttgaagatgaggagcctgaacagcagagcaggtggagatgggcttgggatgggatcttcatgtatagatgaagagagctgaatggaaatctgcagttcttgcaaagggagagcatggtaccaggagatgcctctgcccatgtagcaagcaaaagagcaatatatgatccagggcacaagggacagcagaaatgtcactgttcagtatcat

SEQ ID NO: 96175 - DNA, 568 bp, Chicken  19866894884845_1
gctgtcaaagaaactcatgaagaatatgaggagtttcaccagtttccttagagactctcttagataagatgatttttcttacctaacagaggtcattgaatcacatttcatcacagtcagaagtaaagagaaagataatcagataccatgactaaagcagcacagggtgagtacaggcactcttacaagtagcaggtttaatgtctaactcagtaaaactaacagagtgctttctgtaaaacggctggtttgttcagagggctgttgacctcaaaacaaacaaaaaacaaaagacaacasacgtactaggtacaaccaaaccaaagcagtttgctgtgttgtaaggcactgtactactatcctatacatagaaagaattctgatatttaagacagaagtrtaaaaaaaaaaggaagatagatgaagaaactcaattggaggccttttccatttactactataggtaaatggtagagtaagagaacgtgagagtagggacagagtaggtacaccataaattctccacatttttttcacaagcggctttgacacaaccaaaaatcaagtt

SEQ ID NO: 96176 - DNA, 468 bp, Chicken  19866894884845_2
tcacatttcatcacagtcagaagtaaagagaaagataatcagataccatgactaaagcagcacagggtgagtacaggcactcttacaagtagcaggtttaatgtctaactcagtaaaactaacagagtgctttctgtaaaacggctggtttgttcagagggctgttgacctcaaaacaaacaaaaaacaaaagacaacasacgtactaggtacaaccaaaccaaagcagtttgctgtgttgtaaggcactgtactactatcctatacatagaaagaattctgatatttaagacagaagtrtaaaaaaaaaaggaagatagatgaagaaactcaattggaggccttttccatttactactataggtaaatggtagagtaagagaacgtgagagtagggacagagtaggtacaccataaattctccacatttttttcacaagcggctttgacacaaccaaaaatcaagtt

SEQ ID NO: 96177 - DNA, 600 bp, Chicken  19866894884978_1
caaccccaactgaaaaggaaagctgttgattaactgctcaagagatgacacctaatctaacaaggcgacatttgcatatctgaggaagcgagaggagggttattttcaaggagtggcaaaactgtcccctgaataaattaaaagaaattaaattatggggggctgggaggcaaggcaggtgggggagaactaataaacacatttcaaggagggaaacttagttctatctggacccccaaggaactgcaaagaggaagttatttatctgtgaaggcacatgtcactcacagtgggctctcygtaaagaagccaggattatccctgttcgggtagggtgtgcaggaagtctcacagagtgtgttaaagtcacctggatagaagggcaagctttcagatttgatcttggtatagacaagctaaatccattttttcttttagttctttaccttgttacagatacttgtagctgtgttgagactattttgaatatgatatattaatacttggttttaacttcagctgattttaaataaagaggaatctcagcagagttagctggggaaaaagaaaaaaaaagaaaaaagaaaaaagaaaatttcc

SEQ ID NO: 96178 - DNA, 599 bp, Chicken  19866894885086_1
  misc_feature (1)..(166): n is any nucleotide
nnnnnnnnnnnnnnnnnnnnnnnnnnnnnnnnnnnnnnnnnnnnnnnnnnnnnnnnnnnnnnnnnnnnnnnnnnnnnnnnnnnnnnnnnnnnnnnnnnnnnnnnnnnnnnnnnnnnnnnnnnnnnnnnnnnnnnnnnnnnnnnnnnnnnnnnnnnnnnnnnnnnnnaggtttgaggctactgggggctggggcaggttcccagtgcttctcagtctgattacagctcaggtgagctgagagctgggatccctgccttgccccaaatgacatcacctagggtctcctatgctgcctgcaaygagtctcagggatgtccccatctgccctgggcagagattaatgtcgtaagtgcctgccatccttggcaggatgaagrtgacagttggcagcccaggttttttaggcatggtggtttgaatcctgactaatgcatactgtacatttgtaggaaaaaacaccttaatctgctggttgtgtggaaatgcaaaatcctctttcaattagagagccttagagattttttctgaggtgytttgcttgatagacaggtgtctgtcaggctccaaatgtccaagagggactgaaggatccagacgtg

SEQ ID NO: 96179 - DNA, 599 bp, Chicken  19866894885086_2
  misc_feature (1)..(89): n is any nucleotide
nnnnnnnnnnnnnnnnnnnnnnnnnnnnnnnnnnnnnnnnnnnnnnnnnnnnnnnnnnnnnnnnnnnnnnnnnnnnnnnnnnnnnnnnnaggtttgaggctactgggggctggggcaggttcccagtgcttctcagtctgattacagctcaggtgagctgagagctgggatccctgccttgccccaaatgacatcacctagggtctcctatgctgcctgcaaygagtctcagggatgtccccatctgccctgggcagagattaatgtcgtaagtgcctgccatccttggcaggatgaagrtgacagttggcagcccaggttttttaggcatggtggtttgaatcctgactaatgcatactgtacatttgtaggaaaaaacaccttaatctgctggttgtgtggaaatgcaaaatcctctttcaattagagagccttagagattttttctgaggtgytttgcttgatagacaggtgtctgtcaggctccaaatgtccaagagggactgaaggatccagacgtgtttgggtgagaaagttstgacttgacctgtctgacaaaggcatgctcggtggaggtgctatgttattaaaatataga

SEQ ID NO: 96180 - DNA, 600 bp, Chicken  19866894885086_3
gctgagagctgggatccctgccttgccccaaatgacatcacctagggtctcctatgctgcctgcaaygagtctcagggatgtccccatctgccctgggcagagattaatgtcgtaagtgcctgccatccttggcaggatgaagrtgacagttggcagcccaggttttttaggcatggtggtttgaatcctgactaatgcatactgtacatttgtaggaaaaaacaccttaatctgctggttgtgtggaaatgcaaaatcctctttcaattagagagccttagagattttttctgaggtgytttgcttgatagacaggtgtctgtcaggctccaaatgtccaagagggactgaaggatccagacgtgtttgggtgagaaagttstgacttgacctgtctgacaaaggcatgctcggtggaggtgctatgttattaaaatatagaaagggctggcattccataagcatgacctgttaggaacttgagcaagaaaaaagaaaagtagtaactagaggcatgcgaaaagccagctttagactaacccagattcttctagactgaacagagccttgggaattgcctctgcaaatgagtgattata

SEQ ID NO: 96181 - DNA, 521 bp, Chicken  19866894885086_4
cccatctgccctgggcagagattaatgtcgtaagtgcctgccatccttggcaggatgaagrtgacagttggcagcccaggttttttaggcatggtggtttgaatcctgactaatgcatactgtacatttgtaggaaaaaacaccttaatctgctggttgtgtggaaatgcaaaatcctctttcaattagagagccttagagattttttctgaggtgytttgcttgatagacaggtgtctgtcaggctccaaatgtccaagagggactgaaggatccagacgtgtttgggtgagaaagttstgacttgacctgtctgacaaaggcatgctcggtggaggtgctatgttattaaaatatagaaagggctggcattccataagcatgacctgttaggaacttgagcaagaaaaaagaaaagtagtaactagaggcatgcgaaaagccagctttagactaacccagattcttctagactgaacagagccttgggaattgcctctgcaaatgagtgattatatatg

SEQ ID NO: 96182 - DNA, 539 bp, Chicken  19866894885166_1
aatagcagtaatgtgtaaatcataaaaatcaaagatgggaaagaagggccatcaaacaatcttctatcccaagttttagggatgaaatttttaaacatcacaactttaacagggccctcagagttcagcacctctccatatgtaagtaggactagaagcaggtaatttaagtacagaactcccagttttttatgtatgaatgactggttgcaaatccaatggaagacactgcactccttattattagctttctttaaattagaagtcagagagaaaatttaagactgaaagaccaatgcrgggaagtggactttcaggccagatgttttagtgttctgttctataacytatgatatatatgtataggattcagtgttaaattctctttctgacatatatacctcaggttaaagaacacttattgttaagagatacactgtatagcatttgacattgcatatttttaattgcattgtccattaattttatgcaacatcatcaggggctcagaaaaataagcagagatgtgcatggaaaca

SEQ ID NO: 96183 - DNA, 491 bp, Chicken  19866894885166_2
ccatcaaacaatcttctatcccaagttttagggatgaaatttttaaacatcacaactttaacagggccctcagagttcagcacctctccatatgtaagtaggactagaagcaggtaatttaagtacagaactcccagttttttatgtatgaatgactggttgcaaatccaatggaagacactgcactccttattattagctttctttaaattagaagtcagagagaaaatttaagactgaaagaccaatgcrgggaagtggactttcaggccagatgttttagtgttctgttctataacytatgatatatatgtataggattcagtgttaaattctctttctgacatatatacctcaggttaaagaacacttattgttaagagatacactgtatagcatttgacattgcatatttttaattgcattgtccattaattttatgcaacatcatcaggggctcagaaaaataagcagagatgtgcatggaaaca

SEQ ID NO: 96184 - DNA, 482 bp, Chicken  19866894885217_1
cagcaggaaaagcagaaagctgtgttctgactcgagcaagaagcaagcacaagaaacacttgctcacataatgctctgagacttcagcaggctccgtcagactacatatgcatccactgcagttccagcaggaaaaggccagcagtactgtgcctgtgccttggtccaccctcagcctattttgcaaagacttatggtgatcaatcctttacagattatgaagcactaaaatacttcagagatcagaccaaataaaaaatgtgtagtcacaatttaacttttaattagattttttttttwaaatcttgttggcaactgcgcgattcatttatcccaaaatacatttggctgaaactgctgaacgggtgcaaaagctaaaagaagatattaaaatctctgaaaaaaaaagaagttgtaatttccagaagctatgaggaagaagacagatggacagacaaaacaaaacactttgtatgctctca

SEQ ID NO: 96185 - DNA, 600 bp, Chicken  19866894885387_1
gataagatgccatacgcttaaaaaagggaaaatttagttaagactaaagggtctaatctgcagagcagatctgctgcagtgcaattcatctgatcacttgtttgggtgatgagggagggaagagagaaatccctctagactccagtggaagccacactgtagcagtgtaccaggcacacagcttgcctgcagacatgcaagttgaactgcgctaactgaaacctgaacccagttgcacttaacacatactgatcatctagacaagttgaaagagtactcaagctccttagcacaatactrttcctctgtcataggcaatgrgggcagccctgcccttttcacagctattgcaagtagccatgcaacctcagcacagagagtcagtaatctgcatgaagtagtaatggagataactgaagtgggttacacagcagcaaaggatcaataagtaccctgttatttgtgttcaactcagggccaatagttaggcagttttaattcctgcaactagaactgtaaagactccccactcacacctaggcttgcagcatgctagattgcaagaagttaaccttacttgtaagtctaatttcagcttat

SEQ ID NO: 96186 - DNA, 600 bp, Chicken  19866894885387_2
aaaagggaaaatttagttaagactaaagggtctaatctgcagagcagatctgctgcagtgcaattcatctgatcacttgtttgggtgatgagggagggaagagagaaatccctctagactccagtggaagccacactgtagcagtgtaccaggcacacagcttgcctgcagacatgcaagttgaactgcgctaactgaaacctgaacccagttgcacttaacacatactgatcatctagacaagttgaaagagtactcaagctccttagcacaatactrttcctctgtcataggcaatgrgggcagccctgcccttttcacagctattgcaagtagccatgcaacctcagcacagagagtcagtaatctgcatgaagtagtaatggagataactgaagtgggttacacagcagcaaaggatcaataagtaccctgttatttgtgttcaactcagggccaatagttaggcagttttaattcctgcaactagaactgtaaagactccccactcacacctaggcttgcagcatgctagattgcaagaagttaaccttacttgtaagtctaatttcagcttatcccagaagtacttttttccag

SEQ ID NO: 96187 - DNA, 600 bp, Chicken  19866894885891_1
aatggcgtcttcccctttctccctcccctcccccctccaatttgaatcagttctgcatatgaaatgagaatgtctttctgcagaagtattgccttcttttgcacaggaataaattgggctttaggttcaaaatgtattgggagtatcagtgtaaaactctgcttcatgctctgtttggttcttttcagcccaaatggcatttgcatgtgacatcaagaggaatgagtaagcacaatgagctggagttatactctgctaaatggcaggaattttcctgagatgatggtagacctcactggyggtaaagaagcagtcacgcttctgagaattgcagtgaaaatgttctgttgactgaaatgagggatcacacagaaagacaatttgatgtgtcttgctatttttaataagaaattctctgttgtcagaatggctcttggtaaaccactttgggtctggaaggatctgtgacgttcttgctcagaataattgcaagtgagctggaaggctgctggctttacgtaaatgccaaatgcttctgataccacttcagctgaaatctgtggctactgcaagctctaactcagtgtctcgcaggctttt

SEQ ID NO: 96188 - DNA, 599 bp, Chicken  19866894885938_1
  misc_feature (1)..(73): n is any nucleotide
nnnnnnnnnnnnnnnnnnnnnnnnnnnnnnnnnnnnnnnnnnnnnnnnnnnnnnnnnnnnnnnnnnnnnnnnntttgtgcagtctcaggagactacagaatttaacgcggtacatttagctttacaaccacaagtcagaacaggtcatgcccatagactccagttctctgaaaatacgtatttggcactttcagtaaacaaggcatagttgaaagcatcaggtcccagcagtcagtagccactccaggagatttggtctaaattctcttctaggcacccatgagtctgtcccattatgaytcagtatctggtgcccttcttcaaccagcataaggagcactcaaaatctgactcaagtctcctaagttacaaatgattcagaatctgaggagaagtttcagcacctgagatttctgttgtcatccaattttaaagttttatctttaatgtagatctcccagtcaaatccaaagccagtcatacaagaggcttcaactgggttggctatgacctacacatatcttgagtaccagatatcttaaaagagcaacctgatttcctaaacagcaagaatccagataaatttacattaacttcag

SEQ ID NO: 96189 - DNA, 599 bp, Chicken  19866894886025_1
  misc_feature (1)..(108): n is any nucleotide
nnnnnnnnnnnnnnnnnnnnnnnnnnnnnnnnnnnnnnnnnnnnnnnnnnnnnnnnnnnnnnnnnnnnnnnnnnnnnnnnnnnnnnnnnnnnnnnnnnnnnnnnnnnntagtaaatgctcctcaggtaatgaacttataatccaatcagaacttaaaatccacccagaattttgtgtgtggtctgtcttcagtctccccctcaacacagttctaaagaagctaatattcacaggtttgttttcattatatttataacaaattttttctttctgaaaaacggaagtgtagattactttgtragtttattagttaggaattagctatttaaactaaagcctttttaagccctctgaaagttttggaacactatctcagggaagctcatgttaaacaattttattttcatatgattttgactgataattgcaccaacatcttaatttttgcttcctagttgatacatttttttctatagagagctgcacttaagcaagttgtacttagcctaagaattaagttgattttcraagctagtcttgtaagcactttaagccatacagacagagatatacaagcattttctggtagaaatttatat

SEQ ID NO: 96190 - DNA, 600 bp, Chicken  19866894886025_2
cacaggtttgttttcattatatttataacaaattttttctttctgaaaaacggaagtgtagattactttgtragtttattagttaggaattagctatttaaactaaagcctttttaagccctctgaaagttttggaacactatctcagggaagctcatgttaaacaattttattttcatatgattttgactgataattgcaccaacatcttaatttttgcttcctagttgatacatttttttctatagagagctgcacttaagcaagttgtacttagcctaagaattaagttgattttcraagctagtcttgtaagcactttaagccatacagacagagatatacaagcattttctggtagaaatttatatcatatttcttagaaccctgttttaagatgtgtggaactttaaagtatcctgaagatactttaaaacaatttcaggtgaatttcttcagaacagcaacagctgttcttgcatttggtttgtgtgctctttcccactttcagtttctggagcaaagttcttcatttccaaaacaattttgtgaaacaggtatttctttcagagttttttttattattattattatgccgtt

SEQ ID NO: 96191 - DNA, 600 bp, Chicken  19866894886091_1
cctcttccaactcattaccacagtacttgaacttatctagttattacccttgcttgtcagataggaaaggcttgtggtgatgttttttcatgaggcaagaaggaactgcataagatattcttgttattttgacaaatgttattacaaaatagcaacagtcctgaatcccagatatatacccccatttgtctgaaatgcacaaggtatttccatgctcgtgcccgttgatattttaaaaactagatgagacgcaccacgtgcacaaatactctgttttgttcataggcttgcctgccacawaggggagcagtgtgcactaattagacttcagtgtggtagatgggaagtgcatctgtggtgcaacagcagaagacagaagcatgactcaaggcattcacaaaatgcattgcttgttcackcacgtaaggattccttcactcattgatatctgcccacttttcatcatttttttggcatctatttctgctgaactgcagactttgtattaattttcccatcaagtagttttgattcacagagctccaaaacttattcaatccgttaagaagcatattttatttatcagaggaaaaaaacccc

SEQ ID NO: 96192 - DNA, 535 bp, Chicken  19866894886091_2
cttgttattttgacaaatgttattacaaaatagcaacagtcctgaatcccagatatatacccccatttgtctgaaatgcacaaggtatttccatgctcgtgcccgttgatattttaaaaactagatgagacgcaccacgtgcacaaatactctgttttgttcataggcttgcctgccacawaggggagcagtgtgcactaattagacttcagtgtggtagatgggaagtgcatctgtggtgcaacagcagaagacagaagcatgactcaaggcattcacaaaatgcattgcttgttcackcacgtaaggattccttcactcattgatatctgcccacttttcatcatttttttggcatctatttctgctgaactgcagactttgtattaattttcccatcaagtagttttgattcacagagctccaaaacttattcaatccgttaagaagcatattttatttatcagaggaaaaaaaccccaaaccatgtatttgataactaacgccttgctttttctttttagggatcattttt

SEQ ID NO: 96193 - DNA, 444 bp, Chicken  19866894886151_1
cacttgttttgaagcctttgacaagaaaacacacttctctctgagtaggtttgccttctcactgcttgtcttttagacagtgttactcatgcatattgtaagaaataaatgcagccaggacctttaggcatatgcactactgcaaataaaataaaataagagaaatgcagcataactgcatcatgtagctggtgtcccccaatggcatcaagtacttgtgtgtggctactgtgtgtggaatgagtttcccgtgattcctattatcagtcatcttctccccatgactggtctaactggaayaaataccttcttctcctgttgggtggatttaactcttaagcatgaatgacaaaggtgtgtggtagcaaatatatgtgctaatgatgcaaaattcatcaaaaacatatttagaagacagaaggatctagaaaagtaaaataaaat

SEQ ID NO: 96194 - DNA, 600 bp, Chicken  19866894886212_1
tggctctcttacctcttcctgaccagggtaacaatttaatctgtaattcaaccttatagaaacactttttcccctcttctaaatatcccaaatgtttggaaagaggagacatcttgctttgattgtttctatatcaaatcccatcctgcatgggagccgagaagctggaagcagcagccaagcaaggactccttactttgcacttagactttctttggctctcccacctgcagcgaagctactgagaaaacatcaaggtgagtatgttaggtgtagctcttcttggtcttcatcacactyggtcaggaaccagtggtaagctggtcacaactttggayggacctaaggtgytgtgtatgagtcatttctctctctccttaaaaaccaaagcaaagatttcaaagccccagccttgcttgcaggagtgctacagccaccccgaacacagccgtgtgagtttaaaatgcacttgccaaaagaaaatcagtttaagatagaatacttawtaaacattccacaagaaagctcacccagtttgggctttagattccttcctcactcaaaaatgtaatgctagcatataaggtttctctatattac

SEQ ID NO: 96195 - DNA, 593 bp, Chicken  19866894886212_2
atctgtaattcaaccttatagaaacactttttcccctcttctaaatatcccaaatgtttggaaagaggagacatcttgctttgattgtttctatatcaaatcccatcctgcatgggagccgagaagctggaagcagcagccaagcaaggactccttactttgcacttagactttctttggctctcccacctgcagcgaagctactgagaaaacatcaaggtgagtatgttaggtgtagctcttcttggtcttcatcacactyggtcaggaaccagtggtaagctggtcacaactttggayggacctaaggtgytgtgtatgagtcatttctctctctccttaaaaaccaaagcaaagatttcaaagccccagccttgcttgcaggagtgctacagccaccccgaacacagccgtgtgagtttaaaatgcacttgccaaaagaaaatcagtttaagatagaatacttawtaaacattccacaagaaagctcacccagtttgggctttagattccttcctcactcaaaaatgtaatgctagcatataaggtttctctatattactgacaggaattggagagttccccttcagcca

SEQ ID NO: 96196 - DNA, 580 bp, Chicken  19866894886212_3
ccttatagaaacactttttcccctcttctaaatatcccaaatgtttggaaagaggagacatcttgctttgattgtttctatatcaaatcccatcctgcatgggagccgagaagctggaagcagcagccaagcaaggactccttactttgcacttagactttctttggctctcccacctgcagcgaagctactgagaaaacatcaaggtgagtatgttaggtgtagctcttcttggtcttcatcacactyggtcaggaaccagtggtaagctggtcacaactttggayggacctaaggtgytgtgtatgagtcatttctctctctccttaaaaaccaaagcaaagatttcaaagccccagccttgcttgcaggagtgctacagccaccccgaacacagccgtgtgagtttaaaatgcacttgccaaaagaaaatcagtttaagatagaatacttawtaaacattccacaagaaagctcacccagtttgggctttagattccttcctcactcaaaaatgtaatgctagcatataaggtttctctatattactgacaggaattggagagttccccttcagcca

SEQ ID NO: 96197 - DNA, 425 bp, Chicken  19866894886212_4
gactttctttggctctcccacctgcagcgaagctactgagaaaacatcaaggtgagtatgttaggtgtagctcttcttggtcttcatcacactyggtcaggaaccagtggtaagctggtcacaactttggayggacctaaggtgytgtgtatgagtcatttctctctctccttaaaaaccaaagcaaagatttcaaagccccagccttgcttgcaggagtgctacagccaccccgaacacagccgtgtgagtttaaaatgcacttgccaaaagaaaatcagtttaagatagaatacttawtaaacattccacaagaaagctcacccagtttgggctttagattccttcctcactcaaaaatgtaatgctagcatataaggtttctctatattactgacaggaattggagagttccccttcagcca

SEQ ID NO: 96198 - DNA, 600 bp, Chicken  19866894886339_1
aggagtagcagttgcagcagaaacgaggtatatcccaatgcacaggaagatctgcatcccatactcctgtaggaagggataagtggacttactgtgaagcactagaaattaatagacctgactgtagccaacttctgttagcattctgccttgctgtcaacagtgtggaagcagataaaaactgcacagggtggagatgaccccgagcagaggtgctttcctttactgtgggcttggagcccaccctgtctgagtgtaaagaggggtcctgcctgtgtaggaaaccttggtgcccccgcrcagagctgggaccgagcrctctgtctgatctgccaccagaagcaactgagcacatctctgtgtgctttatgagatcagggtccaccgctttgctgaaagggatgaataaatggttcttaaaaactaatggcatcttctgtatgtgtatacactgtagtctcattgcaatcctctgacatcccccctggtgttgggctggccttgcacacgctcacagccatgagctatctcgtgcagctctctgccgcgcctacaccccgcatccctctgctgctctgaatcattcttcttcctcttgct

SEQ ID NO: 96199 - DNA, 600 bp, Chicken  19866894886339_2
agaaacgaggtatatcccaatgcacaggaagatctgcatcccatactcctgtaggaagggataagtggacttactgtgaagcactagaaattaatagacctgactgtagccaacttctgttagcattctgccttgctgtcaacagtgtggaagcagataaaaactgcacagggtggagatgaccccgagcagaggtgctttcctttactgtgggcttggagcccaccctgtctgagtgtaaagaggggtcctgcctgtgtaggaaaccttggtgcccccgcrcagagctgggaccgagcrctctgtctgatctgccaccagaagcaactgagcacatctctgtgtgctttatgagatcagggtccaccgctttgctgaaagggatgaataaatggttcttaaaaactaatggcatcttctgtatgtgtatacactgtagtctcattgcaatcctctgacatcccccctggtgttgggctggccttgcacacgctcacagccatgagctatctcgtgcagctctctgccgcgcctacaccccgcatccctctgctgctctgaatcattcttcttcctcttgcttgttgcctgcctgcagtg

SEQ ID NO: 96200 - DNA, 600 bp, Chicken  19866894886365_1
taatacgtgccatgttgcatttgttacagatcagacacacaacaggagccctattaccttagaagcacggctattattgagtactgacttaattagggatcaggctggtttgacagaacccatcctgcccagtctcccactgctgggcgttgtgtcctccttccagccccggttcactgcccagcaccaggcagaggggccatcgctgctggtaccccccgacccatctgctttcccacatggcccatggtgttcccagacccccagacttactgctgggtggcagtggagctcagcccrcccccggctcggctcacccacctggctgtgagttcccctggcagggacgtggtgcactgtgcagttcctgcttctgtagttttccacggctgccattgtttacacggagcacccaaggtaaggctgtagctggtatctgctcattatcatcactttcctctttcctctgattgttatgtggtttccatggtttttgtagctggaagcaaagacagcgcgactttcctcccttttgggaaagcactttttgttctcctgaatggtgtcagttatggcaacggtggctgaagggacggggaa

SEQ ID NO: 96201 - DNA, 600 bp, Chicken  19866894886450_1
tgagaagacagcagtgagcttaaatgtttctggttgcattggtagaatttcattttactactggcatactctttgttaaggcttaagtaacctgttactaaaagattatgccttgtctcagattattgtgcatcccttagtaatatgtcattccccattcatatagattctctggagtctgcagcagagagctctaattaggtgtgtctagagctctggaaaataggtcttccatcttattttcatgtttggattcaatttactatattgaaacaattgctttgctctgggatctgtcartgttttctcttccagagcaggaactgaacttggatcagtcacgaaaatgaaatgactgtgagcatcttgcatgaaacctgcagttttcttggtgattctcacatttgtcaaatgcacatgaactcacatagagtagtgccatcacgtatcttctatggatctatttttaaacatgattttgttcaggatgtcaagtattttacacaggaatttaaaagctcccatcagcacacactctgtaatttcaaggccacatgggatttcttttttgttactcttcttggtataatatagacttac

SEQ ID NO: 96202 - DNA, 600 bp, Chicken  19866894886458_1
tcatgcagcactgatgagggaggaaggcatccagatccccgttgttttggttagcagttggagggatgccgtgtctggcttctaagctgaagggtgactgactgtattgatctacaggctctaaaatgtaaccttgcacttaaaaccagaatgtagtcttgcacttagccacattttcagagacaggcaatgcaaacacagcactgcttctcccagttgtcctccattgggttctgtgggtgagtggtgcaggttgacctccccatcaacttacaccgcacaaagacccgattccaagcrtggggccgggctgccagtagtacatatgaaggaggagatgtgttgaatgtattgtatggacccagcagttgtcacgtgtgtgctcgagattcactgtcacagaggtgcatttctgtagggcctctttatggagcagctttcagagcgtgctctgctttcattggggttggatttcccatttctgacctggaggagcagtgttgtgtccccagcattgctgggagctgagaatttgaacgtggcagcgtaccttgaaggcaaactttggttttagagccatttttctttctaaaagcctca

SEQ ID NO: 96203 - DNA, 599 bp, Chicken  19866894886514_1
  misc_feature (1)..(10): n is any nucleotide
nnnnnnnnnntcaaatccatctctccccaactacatcagccagttccttcagaatgctaggatgaatattgtctagccccatagacatgggcactgcctcaagtggtctcagacttgctctgctcttacagtagaagggaattttgctcaaccaaaacccccaatcagtaattcagggacacgagagacatgagaagcctgattggcaatgaagactgaggcaaataacttaagtacctcagccttcttggtgcctgaggagacacctttccatttatcagaggggtacactctcctttrcatatcctcttctgctcaatttatctaaagaaaccattactactatttttcacatccctcactaagtttaattccatccactaatgacgctctgcgcactacagattaaatgcaaactgctatcagtttatataaatatagctaattcactattgggcattgcagagatgcaaagttttatttgatatgtttctagaatacacagaatcttgctcttttaatttttccctgaagagcttagtaacacattaggtctccatgctgagactgctggttgcagtcttactatacaagatctc

SEQ ID NO: 96204 - DNA, 600 bp, Chicken  19866894886904_1
gcaaaactcatctttgtgtaaaatggtgtaaacagtacatttacatcgctgcaaggaaagtctgagacagtgttgtcactgtgtaaaacaatgaattttcattgctgcctggaactgtctgactgcaaaaacagctgctgtctggacttcagcacaatcatcaatcttcattccccaaacacaagctagatgtaaagtctggaagatgcaatgatgccagatctgattctcattgccagagtggaacaattaacaattctgttcttcttagaatttttttgcacctagtatcatttatgkgtctgtattcacctaaggacagagggaagtggaaggagagaaatgtgcccccccccttatccaatcaatgcatgcctgcctgccagtttgctttttgagatagcagaaatttgcagtaatgaacaggttttactggttgttttgtatgcttaaatgcagcygagaactggaaatataagaaaaaatacatatcaatatgtaggtattgttacttaatttttggtctcatctctacataggaggcagtgcaagacttgatcttggcgctgaaggcagaggcaggaatggtaatcccagcaa

SEQ ID NO: 96205 - DNA, 600 bp, Chicken  19866894886904_2
caatcttcattccccaaacacaagctagatgtaaagtctggaagatgcaatgatgccagatctgattctcattgccagagtggaacaattaacaattctgttcttcttagaatttttttgcacctagtatcatttatgkgtctgtattcacctaaggacagagggaagtggaaggagagaaatgtgcccccccccttatccaatcaatgcatgcctgcctgccagtttgctttttgagatagcagaaatttgcagtaatgaacaggttttactggttgttttgtatgcttaaatgcagcygagaactggaaatataagaaaaaatacatatcaatatgtaggtattgttacttaatttttggtctcatctctacataggaggcagtgcaagacttgatcttggcgctgaaggcagaggcaggaatggtaatcccagcaatcctgtctttaaagcatgaagcccaagagctggtcgctcagtggctccttcagcacagcagaactgtgttagctgagcttgttgctaccaaagacttttcaaaggaagaaagaaccctcagagaccttcttgtgattgcaggagcattaataaaagttcgc

SEQ ID NO: 96206 - DNA, 600 bp, Chicken  19866894886979_1
ctttgctcataaatcacccactatttaatctctactggacgtgccttgagttttgatcttttctgtagagcgtccaggaacctttcttaaacccttacaaatgcaaatgttcacccagattcactcccagcactgtggttgggtataagcagggaaagaaccctctgagagctctcccacagggacagctcggggtgttccaatccctcttggtacccagagatgtggccttctgggaagtcctccagtgatgcagggacagcccagagcattgctggcacattggttgaacctgaacckctgcactgctmaattctctcatcttcacatctgttgggaaggggagaaggaagtgtccttctaaagctctgcatcaaacaggtccagagcactcaacgttggatggtagacctcaacttcaacaccaactccagggttgtccarcctcctaggagagcagacacgaggtccatgtcttcatgggtccatgtccatgggtactccagccaatttcctaaggactgaacaagtcttgtgccagaatactgccctactgctagtagggtgatgggtctgaaaatgttgggttgacagagacaa

SEQ ID NO: 96207 - DNA, 600 bp, Chicken  19866894886979_2
aatcacccactatttaatctctactggacgtgccttgagttttgatcttttctgtagagcgtccaggaacctttcttaaacccttacaaatgcaaatgttcacccagattcactcccagcactgtggttgggtataagcagggaaagaaccctctgagagctctcccacagggacagctcggggtgttccaatccctcttggtacccagagatgtggccttctgggaagtcctccagtgatgcagggacagcccagagcattgctggcacattggttgaacctgaacckctgcactgctmaattctctcatcttcacatctgttgggaaggggagaaggaagtgtccttctaaagctctgcatcaaacaggtccagagcactcaacgttggatggtagacctcaacttcaacaccaactccagggttgtccarcctcctaggagagcagacacgaggtccatgtcttcatgggtccatgtccatgggtactccagccaatttcctaaggactgaacaagtcttgtgccagaatactgccctactgctagtagggtgatgggtctgaaaatgttgggttgacagagacaatgtagcagaaa

SEQ ID NO: 96208 - DNA, 523 bp, Chicken  19866894886979_3
ataagcagggaaagaaccctctgagagctctcccacagggacagctcggggtgttccaatccctcttggtacccagagatgtggccttctgggaagtcctccagtgatgcagggacagcccagagcattgctggcacattggttgaacctgaacckctgcactgctmaattctctcatcttcacatctgttgggaaggggagaaggaagtgtccttctaaagctctgcatcaaacaggtccagagcactcaacgttggatggtagacctcaacttcaacaccaactccagggttgtccarcctcctaggagagcagacacgaggtccatgtcttcatgggtccatgtccatgggtactccagccaatttcctaaggactgaacaagtcttgtgccagaatactgccctactgctagtagggtgatgggtctgaaaatgttgggttgacagagacaatgtagcagaaaaagaagttatgtccatgtaaggcagatttatgtgctaaaaagggtcaattcaggca

SEQ ID NO: 96209 - DNA, 600 bp, Chicken  19866894887016_1
tgtggtttggagctataccaagctatgaaaacatagctacaaagtccatctcactggttccacaaaggctgatgtaaccacagttgaatgcctggctcttcggaaagctgatcagcctgctgcagctgtttctgtcagattttatgagaaacagagaccaaatgatatcactgctttcgaacattgcccccaaactgatcggagtccctaccccagagcattcctgaatcaaagctggggcatttaattacatctaaccaatgttgcccgttgggtagacacgctatggaattggattgmgatggaacattcaatgagacacacccaaatagcagagaaaatgaaaacccagcattacaaaggttcaatcagtacccaaatagagagaaaaaggagtagttttttcttagcaatctcttctctcagctggggctgctgccttcacttctcttcacacatttcctgctctctctagcacatattcaaccccacamacatactcaatgctctggctctaaaacatgggaatcaaaaggcttgtgttcagttcctaacttgacaaaagcatggcacaaaccaaatagcttcctttctgtatcc

SEQ ID NO: 96210 - DNA, 462 bp, Chicken  19866894887016_2
ctgatcggagtccctaccccagagcattcctgaatcaaagctggggcatttaattacatctaaccaatgttgcccgttgggtagacacgctatggaattggattgmgatggaacattcaatgagacacacccaaatagcagagaaaatgaaaacccagcattacaaaggttcaatcagtacccaaatagagagaaaaaggagtagttttttcttagcaatctcttctctcagctggggctgctgccttcacttctcttcacacatttcctgctctctctagcacatattcaaccccacamacatactcaatgctctggctctaaaacatgggaatcaaaaggcttgtgttcagttcctaacttgacaaaagcatggcacaaaccaaatagcttcctttctgtatccatatatcccctcccatattccatttaaaacacagtgttgaccttcgcttctccatt

SEQ ID NO: 96211 - DNA, 600 bp, Chicken  19866894887053_1
tgttgtgtcaatttttctgcaattctcaggaactcagccattagcagccacacaacgtagtctagcagcacatctgtccttaccagctttgcaacattagcgtactaacctcaactcttttaactccagcttaaacccgtccacatcacaacagagaaattaaattaaaagaactgctctgtagctgttcaacagcttgacagcctgaagctacagagggagtgttacaagaagtgtccacgctccatcctcaaacagatttaagtgtcctgacaaatggccaaactctttattagcgcragtttcttgacagcatyctacagaaaaaaaagacacaggaaaatatgcccagccatatcgagaagagtttcccagcatatatgctgtttggcctgcatgcatgcatactctcattgtaaataggccgccagcccaaaacacaaaataagtttactgtttttctctaaggctgggtaatcaggaagtggagaggaaatgaacaggaagaatgttcttgagagcaaaggaggattccttgtagccagccagctgcacttgccaactctaccatctgtgccttaaagaacaagagaagagacc

SEQ ID NO: 96212 - DNA, 600 bp, Chicken  19866894887053_2
tgcaattctcaggaactcagccattagcagccacacaacgtagtctagcagcacatctgtccttaccagctttgcaacattagcgtactaacctcaactcttttaactccagcttaaacccgtccacatcacaacagagaaattaaattaaaagaactgctctgtagctgttcaacagcttgacagcctgaagctacagagggagtgttacaagaagtgtccacgctccatcctcaaacagatttaagtgtcctgacaaatggccaaactctttattagcgcragtttcttgacagcatyctacagaaaaaaaagacacaggaaaatatgcccagccatatcgagaagagtttcccagcatatatgctgtttggcctgcatgcatgcatactctcattgtaaataggccgccagcccaaaacacaaaataagtttactgtttttctctaaggctgggtaatcaggaagtggagaggaaatgaacaggaagaatgttcttgagagcaaaggaggattccttgtagccagccagctgcacttgccaactctaccatctgtgccttaaagaacaagagaagagaccaactcagatattgctga

SEQ ID NO: 96213 - DNA, 557 bp, Chicken  19866894887093_1
gtgtcatcatggtaagatgtcaagtaatgatctcatattcaggaatacagaacttccgtaaactgaagaggatttggaaaaacagcactatcatcccaacatagtatatacatttttaaaatgctgctagaggtggtattttgtttggagctgtagttaaagagaatgaaaatggggtttggcaagtatcttatcccaaactaaaatgcctgccgaacaccttcacccgacctgaaacagtgaaatctgtgatgatgtactagatttgatctagttagtgtcagtcagggtgatagcacrtggcttgaaacttctcttgcttttatacttagagatcacacagaagcaaaggaacctttatgtagaataattggggggaaaagacctgtttgtcggtttaacaccgtaaatctgtgtagaccttcaaagaacaaacagaattatatttatcttacgtagcagaagacatttaatggttttgccattttgtttgctctgtggtattctttcggaagtaatgtttatttttttattttattttcaaatctttttaggga

SEQ ID NO: 96214 - DNA, 600 bp, Chicken  19866894887208_1
accctgatggagcactgactttggcactgctgattttggtcatgttttggggggagtgctgagaaatgagggcagcatcaagcctttggtgagtggccacaaccttgcagcttgtgtttcagatgtgactgcaccagcaatgctgaggaaccacgacttacagggctctttggctttttcatggtagggggtgattgttgagcccagaggccctcgagattttggctgggatccctgctttcagcctgacggctatgaccagacgtaagtggctttttacctatggcacttcatgggaaytttaaggaaaggaagggatgggggctgtattttgtttctgtactgagaggagccgcgtacaagcagtgctggcaaggagaaaacactgttctggrtctgaatggggttacagagaaacccaccatcagtatgggggttgttggtttcgccaacgtgtatcactgccaacaccccccactgtggttgggcagcaaagcaaggcgaaggggagggcttggggacatgctgcagcaactcagctgctgaggactgttttggtttcttcccattccagctacgctgagctgcccaaggctgtga

SEQ ID NO: 96215 - DNA, 600 bp, Chicken  19866894887208_2
gccacaaccttgcagcttgtgtttcagatgtgactgcaccagcaatgctgaggaaccacgacttacagggctctttggctttttcatggtagggggtgattgttgagcccagaggccctcgagattttggctgggatccctgctttcagcctgacggctatgaccagacgtaagtggctttttacctatggcacttcatgggaaytttaaggaaaggaagggatgggggctgtattttgtttctgtactgagaggagccgcgtacaagcagtgctggcaaggagaaaacactgttctggrtctgaatggggttacagagaaacccaccatcagtatgggggttgttggtttcgccaacgtgtatcactgccaacaccccccactgtggttgggcagcaaagcaaggcgaaggggagggcttggggacatgctgcagcaactcagctgctgaggactgttttggtttcttcccattccagctacgctgagctgcccaaggctgtgaagaactcaatctcacaccggtaccgtgcactgagtgagctctctgccttcttcctgcagagcaacccaacagaggccccctccagtcccagctag

SEQ ID NO: 96216 - DNA, 599 bp, Chicken  19866894887434_1
  misc_feature (1)..(134): n is any nucleotide
nnnnnnnnnnnnnnnnnnnnnnnnnnnnnnnnnnnnnnnnnnnnnnnnnnnnnnnnnnnnnnnnnnnnnnnnnnnnnnnnnnnnnnnnnnnnnnnnnnnnnnnnnnnnnnnnnnnnnnnnnnnnnnnnnnnnnnctcattggggtcattagggcactcattgggggtatagggcactcattggggtcattagggcagtcactggggtcattagggcactcagtagggtaattagcagacattggggagggtaattagtcagcactcgttgggagtcattagggcagtcattagggtcaayagggcagtcattaggggtaattagggcactcattgggggggtaattagcactcgttggggtcattagggcacttatgggggtcattagggcactcagcagggtaattagcactcactggggtcattagrgcactcattggggtaattagcactcctcggggtcattagggcactcgtcgggggtaattagcactcactggggtcattagggcactcattgggggtcattagggcactcattggggtcattagggcactcattagggtcattagggcactcagcagggtaattagtactc

SEQ ID NO: 96217 - DNA, 564 bp, Chicken  19866894887434_2
  misc_feature (1)..(5): n is any nucleotide
nnnnnctcattggggtcattagggcactcattgggggtatagggcactcattggggtcattagggcagtcactggggtcattagggcactcagtagggtaattagcagacattggggagggtaattagtcagcactcgttgggagtcattagggcagtcattagggtcaayagggcagtcattaggggtaattagggcactcattgggggggtaattagcactcgttggggtcattagggcacttatgggggtcattagggcactcagcagggtaattagcactcactggggtcattagrgcactcattggggtaattagcactcctcggggtcattagggcactcgtcgggggtaattagcactcactggggtcattagggcactcattgggggtcattagggcactcattggggtcattagggcactcattagggtcattagggcactcagcagggtaattagtactcattggggtcattagggcactcattggggtcattagggcactcattggggtcattagcactcattggggtcattagggcactcattggggtcatt

SEQ ID NO: 96218 - DNA, 600 bp, Chicken  19866894887460_1
cactctatttcttctctactcagcatttttggagcttacagcatggacgtggtggccagcacttctttcagcgtggatattgactccatgagcaaacccagcgacccctttgtcaccaacattaggaaatttctcaaattcagtttcctaaacccattattgatattcataggtatgacatttcctcctcttataaagccatgaattggtcacacgtggtgaccagctgtacttccttttagctcccttgtctcagagtccactttgctatctggggagtgcactttgcaaatttgcccycctcccttctgtgccagttttgagttttggaggccttttagagctatgtgtgttgttctcttctctccttttagtgttgttccccttcatgatcccagtgctggaaaagatgaatgtgactctgttacctaccaaagtcatggacttctttgatgcagtcttcatgaagatgaagaaggaacgggaagaaggataccacgtggtgagtccaacccaagtggctgtttctattcattgcactgttctgagcacaggtggaacccggtcatgtcttcagaagctgtggtggatctatttcct

SEQ ID NO: 96219 - DNA, 600 bp, Chicken  19866894887604_1
actacctgccaaagagaactgatgaaatttagttgcaaatacttggatgtataatgtttggcctttctattcttgacataaaaccaagctgaagacatcccactacttgtgaataatttattttttatcatcatggatggctgtaaatctttgcaccaatactttaggtaacatatagtgtttttagagagatggagtgcttcaaaatattctaatatgcaaggagtacattgaaactatttatattctctaggaatccaaggcattgttgatgcataccgtgcttgtcttcctcaagtraggttatatgggccaaccaatttttctccaattataaatcatgtggcaagatttgctgctgcagccacacagcagcaaacagcatctgtaagttcattatcgtagtgtatttattttttaattttctttctattcttgtttataagtaccatttttcttttaaactttaagtgtacctgttttagcagctgtccatttaccttctgaattgatttttgctgtctttgaaactagataaaatctaactattctagcagattgctcacaattctcattaacagtaaacttttcagagttgat

SEQ ID NO: 96220 - DNA, 577 bp, Chicken  19866894887823_1
attaacatggactgacacttgtccattccaagatctaacccttgaactatttaaaaatagaaaacatttctataaatgaagaagctgtacaggtcttgttaaagacagttaagaaaagtggaataagactgacttctcatatagtattaagaaagcccttctgaactgatgggtaaagtaggatggaaacaaagacctctcctaagagtaacttttctctttcattcaaaggtcgcattcactatcatttccaagctttcttctgtgtcagtggactgagctcacacttattctcagtayacaggtcttgattagtcttgattttatttaaaatttaaattwaaaaaaaaagcacctatgattttaaatttatctgatgagactgaatgtttatattgtttctaatttacacttttactaggtctctctctatatatttattattttgcccagagcagagacagaagtgtagagacttcaaacagagggctctagaagtttcagtgccccatgttagcttcctcatcatcatttttgagaggtacggaattagtatatgtacatcacgaagcaccat

SEQ ID NO: 96221 - DNA, 535 bp, Chicken  19866894887823_2
tgaactatttaaaaatagaaaacatttctataaatgaagaagctgtacaggtcttgttaaagacagttaagaaaagtggaataagactgacttctcatatagtattaagaaagcccttctgaactgatgggtaaagtaggatggaaacaaagacctctcctaagagtaacttttctctttcattcaaaggtcgcattcactatcatttccaagctttcttctgtgtcagtggactgagctcacacttattctcagtayacaggtcttgattagtcttgattttatttaaaatttaaattwaaaaaaaaagcacctatgattttaaatttatctgatgagactgaatgtttatattgtttctaatttacacttttactaggtctctctctatatatttattattttgcccagagcagagacagaagtgtagagacttcaaacagagggctctagaagtttcagtgccccatgttagcttcctcatcatcatttttgagaggtacggaattagtatatgtacatcacgaagcaccat

SEQ ID NO: 96222 - DNA, 562 bp, Chicken  19866894887908_1
ttcaagctaagatggacgtatgaatgctttgaccattgctcaaaggctttatctttcttttcaaagtttttcatcatcttgaatcttccactgaagggtactagattcacacatgtggaaaatgaaagaggaagaaagttgtcccagtgagtttccccatttcataccccttttagtcttggaggtctcttgaggtcatggaactgaagctattgaggacttgtttcacccacccacaacacagaaagtccagcatctaaggattacattgctttcttacttaaaaccgtaaagcagttraagaatggcatccttgttcttactgaagcaagagttttgatgttcatgaaggcagacaatgtggagtaaatggtatcagacactgaagaagctatgacattgctgtattccaaacactyccayagtcattctgattctggcttcatccctgcaaatactgtttatggagaaatagcattaggctgaagaggacacatgggactcctaagatgtggtgtggaggggggtgacacctctaacagaatggctgtaaggaattcag

SEQ ID NO: 96223 - DNA, 443 bp, Chicken  19866894887908_2
aaatgaaagaggaagaaagttgtcccagtgagtttccccatttcataccccttttagtcttggaggtctcttgaggtcatggaactgaagctattgaggacttgtttcacccacccacaacacagaaagtccagcatctaaggattacattgctttcttacttaaaaccgtaaagcagttraagaatggcatccttgttcttactgaagcaagagttttgatgttcatgaaggcagacaatgtggagtaaatggtatcagacactgaagaagctatgacattgctgtattccaaacactyccayagtcattctgattctggcttcatccctgcaaatactgtttatggagaaatagcattaggctgaagaggacacatgggactcctaagatgtggtgtggaggggggtgacacctctaacagaatggctgtaaggaattcag

SEQ ID NO: 96224 - DNA, 439 bp, Chicken  19866894887908_3
gaaagaggaagaaagttgtcccagtgagtttccccatttcataccccttttagtcttggaggtctcttgaggtcatggaactgaagctattgaggacttgtttcacccacccacaacacagaaagtccagcatctaaggattacattgctttcttacttaaaaccgtaaagcagttraagaatggcatccttgttcttactgaagcaagagttttgatgttcatgaaggcagacaatgtggagtaaatggtatcagacactgaagaagctatgacattgctgtattccaaacactyccayagtcattctgattctggcttcatccctgcaaatactgtttatggagaaatagcattaggctgaagaggacacatgggactcctaagatgtggtgtggaggggggtgacacctctaacagaatggctgtaaggaattcag

SEQ ID NO: 96225 - DNA, 600 bp, Chicken  19866894887948_1
ggcgaagggaccacgtgtgtttcatggagggctcccaaagcagagcccaggcagcagcacccacaaggtggaacaacagtgatgagcaccgagtcctgcacacacacgaagtgctgggtttgtgccaggtgaaagacacgagaaaagccccacaggaaaacctgacagcatcttaacactaagtgtgtatccccgctgtcacagacacacgatatctttacctatactcattttttcactagaattatcacccatttggggactgaaacacaattttctgggtgttgcactttttctcawtgcttcccattttgtttttctttcctctttcctatttgatcattggaacagctttcactttcagctttcaatcacacacacacacacacacaaaaagtggggggaagcattatttcaaggaacgcattctaatgcaaaaagcctcaccttgatccaatgcagaggcactcaccaaagttgcaaagacccmaggctgtttcagcaggcctgaaaagccattccaagcaggtatgcagccacttgaactgtcggcttacgaatttcaacactgtattacgtggatttcttaattgatcggat

SEQ ID NO: 96226 - DNA, 600 bp, Chicken  19866894887948_2
ccccgctgtcacagacacacgatatctttacctatactcattttttcactagaattatcacccatttggggactgaaacacaattttctgggtgttgcactttttctcawtgcttcccattttgtttttctttcctctttcctatttgatcattggaacagctttcactttcagctttcaatcacacacacacacacacacaaaaagtggggggaagcattatttcaaggaacgcattctaatgcaaaaagcctcaccttgatccaatgcagaggcactcaccaaagttgcaaagacccmaggctgtttcagcaggcctgaaaagccattccaagcaggtatgcagccacttgaactgtcggcttacgaatttcaacactgtattacgtggatttcttaattgatcggatgaatttggagcagccagaggaaagggattctcatctgggcaaagtccctgggagccacatccataacaaattgcatttttattgttacttcctgactgagtaatacagacggagcaaaaaagtacacagaagggaggcacgtcgagttaagtcaaaacacagcaaccctctcctccctcataggttctgt

SEQ ID NO: 96227 - DNA, 600 bp, Chicken  19866894888105_1
acagtcagagctaggactaacaacagcatctttgcagatgaacactcaattaaagatatcttcagggtatattcttatgatcatttgctattaaaggttcgttgaagtgaaaagctttgaatgttgcatgtaggagagaaatttagcatagcctaagcccctgcagaattcggccactggagaaaagctattcaccacagtttgtccatttcccaaaacaaaactgagatcagcccacatacttacatgagtattggctgggttttaaatgagaaaagactcttgttctgggccagaagsacagctggtataaccctgaggatccagttcatagcagaaatgttttgctgcagctttaagccagaactcctgcaagtttcggtatgacagctttagacccaagacataacagagtgctgggattaattaactgtgctcttttcccaaaaacatcaccgtttaagactcctgtgtttttcatggcaatgagatgatcctagtttaaatgttaggctttttgataagcactaaggtgcaattctcctactcttgtttatgcagtgatacagagtcgatgagggattgatgcataattgccta

SEQ ID NO: 96228 - DNA, 599 bp, Chicken  19866894888119_1
  misc_feature (1)..(69): n is any nucleotide
nnnnnnnnnnnnnnnnnnnnnnnnnnnnnnnnnnnnnnnnnnnnnnnnnnnnnnnnnnnnnnnnnnnnntatgttattcatcactgttgcaaacacaccacatccttcctgtgttgttgcagtcacctgctgtctgcaagccgttatcaaagtcatgtgttattatgatgtacggtgcagtaagtttggagaagattttacacataaatcaaaatagctggaggtttgcaagttcaaatcagcatcccgacttgccagaaataaaatgataaaaatgtcttttcacctttttcaattatyttaaatgttgctataagcaactggagaaaattggttttccacttttgaaggcaaagcatggggcctgctggctgtgggcatcaggaggcatttggagaaggggagaaagccatttacagcatcgctgcttggtcctgatcttggtagcccgcaaagggcagataagaaaggtctatcaggcatctcctgtcactgcrggatctccttgtgaagtatctcttcttgtgtcttaactatctcagctgatgcaggctactttctatatttttcttttctaaaaaataggatcccagcatttt

SEQ ID NO: 96229 - DNA, 600 bp, Chicken  19866894888119_2
ttacacataaatcaaaatagctggaggtttgcaagttcaaatcagcatcccgacttgccagaaataaaatgataaaaatgtcttttcacctttttcaattatyttaaatgttgctataagcaactggagaaaattggttttccacttttgaaggcaaagcatggggcctgctggctgtgggcatcaggaggcatttggagaaggggagaaagccatttacagcatcgctgcttggtcctgatcttggtagcccgcaaagggcagataagaaaggtctatcaggcatctcctgtcactgcrggatctccttgtgaagtatctcttcttgtgtcttaactatctcagctgatgcaggctactttctatatttttcttttctaaaaaataggatcccagcatttttgctcagatgagataggttgctttcagctgaataaaatcaggtcyattagcaggtggcattgatagagctgatagtgtctgttacgtagcagcctctcttccttctctctcagagggaaatacattacagtgtaagtcttaacaagcaagcgatctaatcacagtatttattgggctcctattaacttaagtttctca

SEQ ID NO: 96230 - DNA, 491 bp, Chicken  19866894888119_3
ttgaaggcaaagcatggggcctgctggctgtgggcatcaggaggcatttggagaaggggagaaagccatttacagcatcgctgcttggtcctgatcttggtagcccgcaaagggcagataagaaaggtctatcaggcatctcctgtcactgcrggatctccttgtgaagtatctcttcttgtgtcttaactatctcagctgatgcaggctactttctatatttttcttttctaaaaaataggatcccagcatttttgctcagatgagataggttgctttcagctgaataaaatcaggtcyattagcaggtggcattgatagagctgatagtgtctgttacgtagcagcctctcttccttctctctcagagggaaatacattacagtgtaagtcttaacaagcaagcgatctaatcacagtatttattgggctcctattaacttaagtttctcatgcaggaactgattcactacttttcaaggaaggaaaat

SEQ ID NO: 96231 - DNA, 532 bp, Chicken  19866894888208_1
gaggagcctgatgaggttcagtgagggcaagtgcggagtccaacacctagggaggaataaccatatgcatcagtacagagtaagggctgacctgctggagaggagctctgtagagaaggacttcagcaccctggtagacaacaggttgaccacaaaccagcagtgtgctcttgtggccaagaaggccaatggtatcctggggtgtattaaaatgagagcagccagaaggtgaagggaggtgatcttccccctctactctgccgtgatgaggccatatctgtagtactttgtccagttctstgcttcccagtccatgaaaaacagggaacttctagagagagagcagyggagggctacaaagatgatragagatgtggagctgagagacctaggactgttcatcctggacaacagcagactgagaggggatcttatcaatgcttataaatatctaatggctgagagtcaagaggacgaggccaggctcttttcagtggtgcccagtgacagaacaaggtgcaacaggcacaga

SEQ ID NO: 96232 - DNA, 485 bp, Chicken  19866894888208_2
tagggaggaataaccatatgcatcagtacagagtaagggctgacctgctggagaggagctctgtagagaaggacttcagcaccctggtagacaacaggttgaccacaaaccagcagtgtgctcttgtggccaagaaggccaatggtatcctggggtgtattaaaatgagagcagccagaaggtgaagggaggtgatcttccccctctactctgccgtgatgaggccatatctgtagtactttgtccagttctstgcttcccagtccatgaaaaacagggaacttctagagagagagcagyggagggctacaaagatgatragagatgtggagctgagagacctaggactgttcatcctggacaacagcagactgagaggggatcttatcaatgcttataaatatctaatggctgagagtcaagaggacgaggccaggctcttttcagtggtgcccagtgacagaacaaggtgcaacaggcacaga

SEQ ID NO: 96233 - DNA, 465 bp, Chicken  19866894888208_3
catcagtacagagtaagggctgacctgctggagaggagctctgtagagaaggacttcagcaccctggtagacaacaggttgaccacaaaccagcagtgtgctcttgtggccaagaaggccaatggtatcctggggtgtattaaaatgagagcagccagaaggtgaagggaggtgatcttccccctctactctgccgtgatgaggccatatctgtagtactttgtccagttctstgcttcccagtccatgaaaaacagggaacttctagagagagagcagyggagggctacaaagatgatragagatgtggagctgagagacctaggactgttcatcctggacaacagcagactgagaggggatcttatcaatgcttataaatatctaatggctgagagtcaagaggacgaggccaggctcttttcagtggtgcccagtgacagaacaaggtgcaacaggcacaga

SEQ ID NO: 96234 - DNA, 599 bp, Chicken  19866894888288_1
  misc_feature (1)..(157): n is any nucleotide
nnnnnnnnnnnnnnnnnnnnnnnnnnnnnnnnnnnnnnnnnnnnnnnnnnnnnnnnnnnnnnnnnnnnnnnnnnnnnnnnnnnnnnnnnnnnnnnnnnnnnnnnnnnnnnnnnnnnnnnnnnnnnnnnnnnnnnnnnnnnnnnnnnnnnnnnnnnnncttgagaattgctgcttttcctgttgaattcttacaacggtcaccttttgcaaaggacagcagtcagacgatagacaacagttgcattcctcttgcgaaggacaagacagacaacttgagacaatggcctcaagttgcaccargggaggttgaggttggatattaggaagaacttccccaaaagagtggtcaggcactggagcaagctgcccagggaggtggtggggtcaccatccctggaggtgttccagaaccatggggatgtggcatmtggggacataattcagtgggagatattggtggtagatkggtgggtggactggatgatcttagagatcttttccagcctcagtgattctgtggttctgtgaaatcacaccgaagctctcctggtgatgggttcgttttctctttttttctttactagagttcattgttaagt

SEQ ID NO: 96235 - DNA, 599 bp, Chicken  19866894888288_2
  misc_feature (1)..(29): n is any nucleotide
nnnnnnnnnnnnnnnnnnnnnnnnnnnnncttgagaattgctgcttttcctgttgaattcttacaacggtcaccttttgcaaaggacagcagtcagacgatagacaacagttgcattcctcttgcgaaggacaagacagacaacttgagacaatggcctcaagttgcaccargggaggttgaggttggatattaggaagaacttccccaaaagagtggtcaggcactggagcaagctgcccagggaggtggtggggtcaccatccctggaggtgttccagaaccatggggatgtggcatmtggggacataattcagtgggagatattggtggtagatkggtgggtggactggatgatcttagagatcttttccagcctcagtgattctgtggttctgtgaaatcacaccgaagctctcctggtgatgggttcgttttctctttttttctttactagagttcattgttaagtgtttttttaccagcccaggcatcattctgtacatttgtgtagacggatggaggagcagtcactgagtcactgtcatttactggaggggaatgttctatttttaattctgcatctctttacgggtggat

SEQ ID NO: 96236 - DNA, 600 bp, Chicken  19866894888288_3
tgctgcttttcctgttgaattcttacaacggtcaccttttgcaaaggacagcagtcagacgatagacaacagttgcattcctcttgcgaaggacaagacagacaacttgagacaatggcctcaagttgcaccargggaggttgaggttggatattaggaagaacttccccaaaagagtggtcaggcactggagcaagctgcccagggaggtggtggggtcaccatccctggaggtgttccagaaccatggggatgtggcatmtggggacataattcagtgggagatattggtggtagatkggtgggtggactggatgatcttagagatcttttccagcctcagtgattctgtggttctgtgaaatcacaccgaagctctcctggtgatgggttcgttttctctttttttctttactagagttcattgttaagtgtttttttaccagcccaggcatcattctgtacatttgtgtagacggatggaggagcagtcactgagtcactgtcatttactggaggggaatgttctatttttaattctgcatctctttacgggtggatgaatggaagctaatagtcatggtgaaatttgaatgtcag

SEQ ID NO: 96237 - DNA, 599 bp, Chicken  19866894888334_1
  misc_feature (1)..(86): n is any nucleotide
nnnnnnnnnnnnnnnnnnnnnnnnnnnnnnnnnnnnnnnnnnnnnnnnnnnnnnnnnnnnnnnnnnnnnnnnnnnnnnnnnnnnnnaaatgtcagactggtggtccttgtttgcataacctccttctgttggtatccattcagtgggagaaaagcagtcccccttacaaggtttgctattaaccaggtcccttccctgttggttcattggcttgtgagcacatcccacactgcaacgcttaccaggttggcctcagatgcagcccatgcgctcctttcctcacccaatgcctcaatatawagctgcttaattgattatactttatccctcctatgtctggatggagatttttactcacgcttacggttgacaccaggcagttgtgcacgactcagcaaaaccctggctgagacacatgaatactaagacggctacagaaagatgaatagcagacttgctgcctcagaagtttctgggataatttttgcaaatactgctaaaatatgctaaagaccagacaaatccaggcaagacccgaggcttaatacagtctgttattgttagaaggcttaaatgttactattaataaaaaagcatga

SEQ ID NO: 96238 - DNA, 600 bp, Chicken  19866894888373_1
ttgatctacctgctccactagcgctgcagtgctgcttgaagcttagagaacattcccgtgtcgtgtttcctctcctcttgcaaagcagagatcccattgtatctttgttgaatgatatcaggaggaactgtagcaggttctaccatgaattaaaaatgtgcattcagtgggatttctgagagtgacagaaaaactcctgaaatgaaggagaacatcctgtcatgttacttacttgaaaatgaacttttaatgccaaaaacagggccagcaatccttactatattgaaagctcgtatacaygtatacacatactgcactctatttatttatttcttaaaagcaaaccataaaaacaaagtaccaagaggcaacaaatgattgacacctggagaagaaagtatattttctgaaggagtattcccatgtcctgtataaggcagggctttttttacttctaattttgaatctgttgtgcaatcatatcatggtacattcggtattcacaagtacagcactgcaggtgcaaacttgccattcatagcaagaacacttgcggggaagagagcacttttgtggtgatgcttgctgagggcctttgta

SEQ ID NO: 96239 - DNA, 600 bp, Chicken  19866894888529_1
ggttttgcttttgcaacctgtgcaaggcataacagcacgtcaccaccagggaacaaacctaaatcctgctgacctcacatatgttttttcttcactacagtgcctctattcaggctccctcccactattcccttcttatttagaacccactattgctcttccccaagtaaacccagcaaaaccagaaaacaatacaactgcctcatgtaacatctctcccatagcctctgaaatctgttcttcacagctgatatttcacatcaactgtttaaaagcagcagcttccactcagtgaaaaayttattgtccattcacgatcaatgcatgcaaaaatggtattattacataaaatgaaaacattggactttcacatttggatatttactttccaagcctcttagctgaccataggttaggcaaaagcaagcaaacaggaccatggtcttactcacccctggtttacttcacaaaaacatgatttcttttattttttttaaacatattctgctttgacaggcatcttagcccaaccacagtgcttccaacaaatcagcagagctcttttcctgtgtctgcagcttgatcaaacattttcaatgc

SEQ ID NO: 96240 - DNA, 600 bp, Chicken  19866894888618_1
acaatgcagtaaggttctcctgatgcatcctacaaaaagcagatatctgtgaaacatgaaagcaatcatacaagaaatggtatagttaggaaagaatgagatattttctgtgatatgaattctcaaaactctttaagcacagactaaactcagaacaacaacaaaaaaataatagttccttagtaagtcagggttatttatattttgcccaactaatcccatgcaaaaaatctcatttcctttctaactgtataaaattaatgaatttgactatttttctagcaggaaagcccttaggayttttttttgtcaaaaatattccaaagatagcagagcttatgagtgaataattttttagtaaataaaaaaggggatgattttgtataaattgcaaataaatactgagtacaggcagcaatgtattcttgcttcaaattactctttgtctgagggcattaatatattcagcatgttataactataacattttctatagtgttaataattccacacaggtccttaacaaatttttcacaggaaaggcacgcgtttctcttaagttgtatcacacttgagttatgtattaaaaccatgtccagt

SEQ ID NO: 96241 - DNA, 600 bp, Chicken  19866894888618_2; identical to SEQ ID NO: 96240

SEQ ID NO: 96242 - DNA, 600 bp, Chicken  19866894888716_1
ggccgcatagaccctctgctgctgcaatgggaacaggagacaaagaaggggtgatgaaaaactcagagataaaaactgtggtgcaagagagcttttattgcaggtacaggggggaggggaggtgcctaaaggacagtccctggctagaggctgtccctatctccttgcacagggcagaaagacaggagcaggcaatcagcgctgggctgcatcatcacagggcagtgagtcctgaagcaaagatcaaacggagcagaggaagacagtgctggtctctgtgcaggtacgaggtatccaatytccagagcccagaagtactgaaggggagcccttcctcacggcatcgggcagggatgtgctggggcttctccagagctcttcttcgaatgtggacagaggcagtgttgtgcttagcagggcccacagctgcccagaagggatctgtagcctcggccaaagccaccatatccgcagctgccaaagcctccatagcccccatagccgccaaggcctccatagcctccatagcctcccaggcctccatagccaccaaaaccggccccgcgtccaaaggtgccacccatgcccgatccaacagcg

SEQ ID NO: 96243 - DNA, 600 bp, Chicken  19866894888791_1
gttgggtcccagcccttctgccacagcatgcaaagccaagcacagatgttctcagtcaccttcccttccaaagtagatttccattttgaagagaaaacaaacaaacaaacaaaaaaccccaacacattaaaaaaaaacaaaaaaaaacccaagacctagctcacatgttccaaagcatctaggaaactgcaggatcagcttgtcccaagatcttcctaggattgaacccaagctcttccctccggcacgcagcaggaagagacagatttctggagctgctccagcccctgagaacgccargggmarattcacctcacttggctctgtgtgcagaagccccctggtacgtgatagatgctccccaatctccttttgttatcgatctatttgttgatgtagcacagctcagctcctgcctgagccttccaacacctcgctgctctcagcctcccagacctaaggccaagactttgtcacctcgttagtttctccaccccgtgaagtcacttctgagctactgccttctctgctaggacccagcaatgaaaacacagccaccctgcacaccagacagctctgttcacggtgtccccccatgta

SEQ ID NO: 96244 - DNA, 600 bp, Chicken  19866894888791_2
ggtcccagcccttctgccacagcatgcaaagccaagcacagatgttctcagtcaccttcccttccaaagtagatttccattttgaagagaaaacaaacaaacaaacaaaaaaccccaacacattaaaaaaaaacaaaaaaaaacccaagacctagctcacatgttccaaagcatctaggaaactgcaggatcagcttgtcccaagatcttcctaggattgaacccaagctcttccctccggcacgcagcaggaagagacagatttctggagctgctccagcccctgagaacgccargggmarattcacctcacttggctctgtgtgcagaagccccctggtacgtgatagatgctccccaatctccttttgttatcgatctatttgttgatgtagcacagctcagctcctgcctgagccttccaacacctcgctgctctcagcctcccagacctaaggccaagactttgtcacctcgttagtttctccaccccgtgaagtcacttctgagctactgccttctctgctaggacccagcaatgaaaacacagccaccctgcacaccagacagctctgttcacggtgtccccccatgtaactg

SEQ ID NO: 96245 - DNA, 600 bp, Chicken  19866894888791_3
tcccagcccttctgccacagcatgcaaagccaagcacagatgttctcagtcaccttcccttccaaagtagatttccattttgaagagaaaacaaacaaacaaacaaaaaaccccaacacattaaaaaaaaacaaaaaaaaacccaagacctagctcacatgttccaaagcatctaggaaactgcaggatcagcttgtcccaagatcttcctaggattgaacccaagctcttccctccggcacgcagcaggaagagacagatttctggagctgctccagcccctgagaacgccargggmarattcacctcacttggctctgtgtgcagaagccccctggtacgtgatagatgctccccaatctccttttgttatcgatctatttgttgatgtagcacagctcagctcctgcctgagccttccaacacctcgctgctctcagcctcccagacctaaggccaagactttgtcacctcgttagtttctccaccccgtgaagtcacttctgagctactgccttctctgctaggacccagcaatgaaaacacagccaccctgcacaccagacagctctgttcacggtgtccccccatgtaactgga

SEQ ID NO: 96246 - DNA, 599 bp, Chicken  19866894888840_1
  misc_feature (1)..(3): n is any nucleotide
nnntcatgactgcatttcattccgcttagttttgctgtttttcagatccttgaatcaaatttctgtcgggacatgaacccctggatattccttacagtatcaactctggctaccaactcaatgaggatctctacactactgtgataaaaattcaggaagtgagttgaaacactgtacatttctccactttgagtactgcatacaattattaacctgataacaagagagggagtgaggcagcctttaaacagtgagccagttcatgacactgttttgagatatgaatagattcaaaacccyttttatttatgagaagcaatgtaattgtcagcatagctaatgacttctcaggttaccaacttatttttttgcactgactcataatattacctgttccacttgctctgctcattctggtctctgacagggaacatagctcactcctctctaagctttttcagaattcatgcacagtggagggagtagcgacagctgagtcatgatgtttcaactacaaaagcatttccaactttgccttcagatataatgtgaaagtaatagctagggaaaaataaaaataaaataaaataaaaataaaa

SEQ ID NO: 96247 - DNA, 583 bp, Chicken  19866894889155_1
tacaactgggcagtgcatacttaaggctaactggcaaagaagtgttgctttaggcttagaaacactgtcttttcacctctgggacctgggtctgttccagcttaatccaactacaaattgttgtcttgaaaagcctgcagcttctttcagtgcttccacccccctgccttgtggagtgtaattacccagcaattaacattcttgtttaccagtggtgatttctgagtggtgtcagtgcgtgtgtgtttatgtaagaaatgggaactttattaaaagctacatgaactgacccaatgctcytgggaaggagaagacaaattggtgaggaaaactgaaagatcttaatagtccaaaagggagttcagtattaagacaaaacacaaaaataaaatatctaatttgcttttgcttcatttctttgaaagacctaccacagagttgtttcccctacctgatgtaaatcattgcttctgcaacatccagtcattcaaggactgttgttgcatttgaatagttgcagcatgataaagtgctttggagataagtttacataaagacaaattaaatttatcctgccagaata

SEQ ID NO: 96248 - DNA, 600 bp, Chicken  19866894889161_1
aatatctgccttaggctatgacatgtctgagtgtttgctttagtggtcattttcagatactgaagtagacacacaaaaatagggtttatgaggaagataagaattctgtttttttttttttttaactaaatacaagaacaataaactccatctctttttccaataaggttcttttaacagacataagatggctttggctgaagacctttgaatataattcatttatgtgagtgatagtacactcatctgagacagaatgctgttctgatgagtatgctcttgaaaatggtgttggaaagygtccttctatratgttgcagagatgttccttactatgatattgtgatacacactatggagaactgtgtcctgtctccaggactakctgtgaacagacatctaggatgaacatgtatttctcttcagtaatctcaccatgtgtagctgttgggaaattatttaggcattcataacatcctttttcaaggagttccatgggtctgatatctagtgtgggaaaaattgcattgttttatttcatttaaagtaattttctatgagtttcttttgaaggtgtattgctcttttacttaaatacaa

SEQ ID NO: 96249 - DNA, 600 bp, Chicken  19866894889161_2
taggctatgacatgtctgagtgtttgctttagtggtcattttcagatactgaagtagacacacaaaaatagggtttatgaggaagataagaattctgtttttttttttttttaactaaatacaagaacaataaactccatctctttttccaataaggttcttttaacagacataagatggctttggctgaagacctttgaatataattcatttatgtgagtgatagtacactcatctgagacagaatgctgttctgatgagtatgctcttgaaaatggtgttggaaagygtccttctatratgttgcagagatgttccttactatgatattgtgatacacactatggagaactgtgtcctgtctccaggactakctgtgaacagacatctaggatgaacatgtatttctcttcagtaatctcaccatgtgtagctgttgggaaattatttaggcattcataacatcctttttcaaggagttccatgggtctgatatctagtgtgggaaaaattgcattgttttatttcatttaaagtaattttctatgagtttcttttgaaggtgtattgctcttttacttaaatacaatgaacaattag

SEQ ID NO: 96250 - DNA, 600 bp, Chicken  19866894889161_3
ttatgaggaagataagaattctgtttttttttttttttaactaaatacaagaacaataaactccatctctttttccaataaggttcttttaacagacataagatggctttggctgaagacctttgaatataattcatttatgtgagtgatagtacactcatctgagacagaatgctgttctgatgagtatgctcttgaaaatggtgttggaaagygtccttctatratgttgcagagatgttccttactatgatattgtgatacacactatggagaactgtgtcctgtctccaggactakctgtgaacagacatctaggatgaacatgtatttctcttcagtaatctcaccatgtgtagctgttgggaaattatttaggcattcataacatcctttttcaaggagttccatgggtctgatatctagtgtgggaaaaattgcattgttttatttcatttaaagtaattttctatgagtttcttttgaaggtgtattgctcttttacttaaatacaatgaacaattagtccccgtatgctgtctctatgctactctctgttgtgcagaactttgtcacatccatcctaaatcacctttttta

SEQ ID NO: 96251 - DNA, 600 bp, Chicken  19866894889423_1
atcagtatttaacatttatagcatcatgccatggtgggagttgaagagttaatgtggcagctctgttttctgaagagaagaatgaactacagctcccaggaaaagacatgacattcccagaagacttcattttgttattttctgtcttccaggggagggaaaagatgaaagagtggagaggtcatgggatcgctctcttttctactccccggctgtcaatacagcagcaggtcagcataagacctggtatcagaaaactctctcaatctctctctctcatttatttgatttattagcttyaatctcaattgagttatatttcactactatcattagtaaactaagtttgttttttttttttttcctctggtcgttgccactgtttttctttcatcaaggcctgtttccccccatccccaaccttttcctgggtgtgggcccatgggtctgctaccttcctgtcacggagacagattagatctagactgtttagatctaaatgtgacacctgaaaacacagatgaggsagctttaatacatgttactctgctgcagaataaatgatggactttgcttaagtttatccggctttttatctga

SEQ ID NO: 96252 - DNA, 600 bp, Chicken  19866894889423_2
caggtcagcataagacctggtatcagaaaactctctcaatctctctctctcatttatttgatttattagcttyaatctcaattgagttatatttcactactatcattagtaaactaagtttgttttttttttttttcctctggtcgttgccactgtttttctttcatcaaggcctgtttccccccatccccaaccttttcctgggtgtgggcccatgggtctgctaccttcctgtcacggagacagattagatctagactgtttagatctaaatgtgacacctgaaaacacagatgaggsagctttaatacatgttactctgctgcagaataaatgatggactttgcttaagtttatccggctttttatctgagaattcgggacttcacagcaatgtgtaggttgctccataagtaatcctcctatttatttccatggaaactacaatggctacaaagagcacaataacactgtgataaagcaaatttggtcagactgaccctctgctgccatgtgtcacatggcaacaaagtgtaacggaatattgatgggaagggttaacctctactgtcatatcaccaacatcctctgacatcctgg

SEQ ID NO: 96253 - DNA, 600 bp, Chicken  19866894889433_1
ctgctactggaacacattgcttattctgcacacatgcacacaaaacttgtggctatttactacatatgcccttcctcccagaacaatctatgtgaatctgtagacagagaaaagccaaagcaagaatttcaggtaggatccaaacattttttcctgtccattttattctagtatatcagcagttctcttgctcttctctgttctcatgctgttttgcaatcactgctacaagaatggccacttcaagctgaaatccaaacagggcaccatacctggagaagcctgtgcacacacaccacrcaatggttcatatcctccagggtgtgcatcagagagggaaagaacagggcacttgtcaggccactcccagggtgtctactctctcccctaacttctcagacctcattgtgggaaaatagttgtcatatgcttgtaacatgcctcacactttggctggctatatgaatccacaactcttaaacttgtcttaactattgctcttgttctgcaggcactgtaatatttgttactttcaatctatcctggaaagctttgcacactgtgttgcatgagccagaggaccactcctgcactgctcct

SEQ ID NO: 96254 - DNA, 599 bp, Chicken  19866894889504_1
  misc_feature (1)..(44): n is any nucleotide
nnnnnnnnnnnnnnnnnnnnnnnnnnnnnnnnnnnnnnnnnnnnatgctgtaactaattgttattctttaatagtctctacatcattcatcacacagtgaactctagatgctgaagacagatggaccaccagatggaccctgggaaggattggttaaaatgtcagtgataagctaacagaatgaaatgcagtagactgaggagactattctgctgaaaaccatctactgaaatggggtttgtattattcacattcattaaagcacacttcaactgtgctgttttgacattttctgtttcragactttcaagtcaagcagctctgtgtttgctgttttgctggggttttttttcttttccaaatggttgtttgatgatagattttcaaaagtgaccctagctctttaaggcgattgctttgccattgaggaatcttgccattrttatattcagccatcaaacttacaagtacaccaattcagactctgaagagcaaactgatgtaaggatgaagattatataagggacagaagtgagttattgcttgcttctggtaaactcgcataacttgctttccaattcttaccgttcatttacctg

SEQ ID NO: 96255 - DNA, 600 bp, Chicken  19866894889504_2
ggaaggattggttaaaatgtcagtgataagctaacagaatgaaatgcagtagactgaggagactattctgctgaaaaccatctactgaaatggggtttgtattattcacattcattaaagcacacttcaactgtgctgttttgacattttctgtttcragactttcaagtcaagcagctctgtgtttgctgttttgctggggttttttttcttttccaaatggttgtttgatgatagattttcaaaagtgaccctagctctttaaggcgattgctttgccattgaggaatcttgccattrttatattcagccatcaaacttacaagtacaccaattcagactctgaagagcaaactgatgtaaggatgaagattatataagggacagaagtgagttattgcttgcttctggtaaactcgcataacttgctttccaattcttaccgttcatttacctgcaatactaattccaacaacttctttggattaagccttgagaatttyattacaaacatggaaagaaatgcatacacatggcagtgtatcagcagtagggaacaagctaagacgggtcaggaaagactccaggcagaagctttgt

SEQ ID NO: 96256 - DNA, 547 bp, Chicken  19866894889504_3
tttttttcttttccaaatggttgtttgatgatagattttcaaaagtgaccctagctctttaaggcgattgctttgccattgaggaatcttgccattrttatattcagccatcaaacttacaagtacaccaattcagactctgaagagcaaactgatgtaaggatgaagattatataagggacagaagtgagttattgcttgcttctggtaaactcgcataacttgctttccaattcttaccgttcatttacctgcaatactaattccaacaacttctttggattaagccttgagaatttyattacaaacatggaaagaaatgcatacacatggcagtgtatcagcagtagggaacaagctaagacgggtcaggaaagactccaggcagaagctttgttgcaaaacagaaacacaaaatagagatttgcctgatttcatgtggttcatcattcagctgcttgatttctccactcttcatttgcttcacaagaaaaaaagctgtttccttcaaacttgcaatattagttatgattctgcaccagtgcca

SEQ ID NO: 96257 - DNA, 600 bp, Chicken  19866894889608_1
taatgggaaaactttgcctttgatgcttaaatacttggctgtatcacagaacttagagttttgaagtgagaaaatattaccattctaattgtttacagtaaatgcccacacatgaatgatctttgtggttttgttaaccaagagtgacaataaagcaacaaaattcctgcatggcataacagaagttgaaaaggtcggatcagattttgtgtcttctcctcaggaaagaatattgaaagcagccacctccaaccccttatgaatagttaggaaagaaacatggtgacataaagagatggrgagggcttgcagtgcaaagctctttttggatttgtgtgtccttccaagatcctctgaatctgagcaagactgtcgagttgagacgtgctttttagtcttgagaaagactgcacacaacggttcttcagtctattatgataccagcactgatcttccaagcgccgtcagccttttactcattgctagagcaatttagtgtgatgtttgcatgaaggatatttcagctcattgtcctctgtgttaggctgtgatattagctgtgcttttgttcagttagccttgatttttatctgcgtctgt

SEQ ID NO: 96258 - DNA, 600 bp, Chicken  19866894889631_1
ttaaacaactgcattcctatttagaggaacatcctgatgttcaaagccaccaaacactcactaaaaccaactgaaactaaagctacttaagtacaaaccaaagcagtatttactttcaaatttctgcactgaatgaggagtctgatttcagcattcaagttatttaatccagtattaacctccaaactttgggattcaaatttcttcataaacaaagcaaatgacattatccccatttttataaggcagctgctgacatctccaaatgacagcctgctgggcaggcttcagggctaacakagcagggttcctggaaatcagaaataaatccagcagagctcaggagggtttctgtgcaaaacctacccgcactacacacctacagcatctgccagtgccattcatcttccacagtcacaatcgccatcaaatacaaagggagaaaaccaaagcaagccagtatgaaagaggagttgccaggcacacaacgtgaaggcagcaaagcaggacaccaagctgttcaggactgtgacacttggagcaattggcaaaaacactgtctctctctcactgaagcctaatggctgatgggacaaattc

SEQ ID NO: 96259 - DNA, 599 bp, Chicken  19866894889665_1
  misc_feature (1)..(100): n is any nucleotide
nnnnnnnnnnnnnnnnnnnnnnnnnnnnnnnnnnnnnnnnnnnnnnnnnnnnnnnnnnnnnnnnnnnnnnnnnnnnnnnnnnnnnnnnnnnnnnnnnnnnacatagcgatggcatgatcctagaagatcatgcaacaggcagaaggcaccaggagttgtacaaagggccatgctggtggcaacccgcactggactgcatggaaattctgcagctactgtaagcaattaaaagaacaagttttcttgcacatggtaacatgatctactgaaatttcaatcacaatgagtttttttgcttgygtcggttrctccatatagaatctataggrattatgaaccaaaaatcagatcctcctgtaggtgatatctgttgtcccaaagatgtattcctcaacaagtaagaacacagcattaaggaaaacacatgacatgggtaaaaaaaactaaaagtaaataaaaataatgaagagaagggagaaaagacaagaaatttttttgagcagggcagaacaaatgtctgactgaaaagcttcaggtccagctgggagaaggccaagactaatttaacctctggtcaaatggttgggagttagctagtt

SEQ ID NO: 96260 - DNA, 599 bp, Chicken  19866894889665_2
  misc_feature (1)..(92): n is any nucleotide
nnnnnnnnnnnnnnnnnnnnnnnnnnnnnnnnnnnnnnnnnnnnnnnnnnnnnnnnnnnnnnnnnnnnnnnnnnnnnnnnnnnnnnnnnnnnacatagcgatggcatgatcctagaagatcatgcaacaggcagaaggcaccaggagttgtacaaagggccatgctggtggcaacccgcactggactgcatggaaattctgcagctactgtaagcaattaaaagaacaagttttcttgcacatggtaacatgatctactgaaatttcaatcacaatgagtttttttgcttgygtcggttrctccatatagaatctataggrattatgaaccaaaaatcagatcctcctgtaggtgatatctgttgtcccaaagatgtattcctcaacaagtaagaacacagcattaaggaaaacacatgacatgggtaaaaaaaactaaaagtaaataaaaataatgaagagaagggagaaaagacaagaaatttttttgagcagggcagaacaaatgtctgactgaaaagcttcaggtccagctgggagaaggccaagactaatttaacctctggtcaaatggttgggagttagctagtttccttttt

SEQ ID NO: 96261 - DNA, 599 bp, Chicken  19866894889665_3
  misc_feature (1)..(71): n is any nucleotide
nnnnnnnnnnnnnnnnnnnnnnnnnnnnnnnnnnnnnnnnnnnnnnnnnnnnnnnnnnnnnnnnnnnnnnnacatagcgatggcatgatcctagaagatcatgcaacaggcagaaggcaccaggagttgtacaaagggccatgctggtggcaacccgcactggactgcatggaaattctgcagctactgtaagcaattaaaagaacaagttttcttgcacatggtaacatgatctactgaaatttcaatcacaatgagtttttttgcttgygtcggttrctccatatagaatctataggrattatgaaccaaaaatcagatcctcctgtaggtgatatctgttgtcccaaagatgtattcctcaacaagtaagaacacagcattaaggaaaacacatgacatgggtaaaaaaaactaaaagtaaataaaaataatgaagagaagggagaaaagacaagaaatttttttgagcagggcagaacaaatgtctgactgaaaagcttcaggtccagctgggagaaggccaagactaatttaacctctggtcaaatggttgggagttagctagtttcctttttcctcttacatcactcccagag

SEQ ID NO: 96262 - DNA, 600 bp, Chicken  19866894889710_1
gcgacagagccccaaaatgagctccgcaccacctcccccaggggcggagggcagctggatgggagcctggcagccactggggcagggatggctgtgataccagaaggatggcagggccaggcccagccggcgccacgacgtgcacccaccattttgtccccgcgccgggccggaaggagcgaggcactgtgcgcacgctgtatttatagtcgccccgcccccggtgacgcaacacgcggagtgaaagatctcgcgagagcagggggcgcgcggcgctacgggaggggagcggggtcagartggtgacgaaggcgcagcacggtcgcgctggaatagcgagcgccatcttgtcccgggraaggcattgacggctcttggatgctcttctcatcttctccacctgctgcgcctgcgcgcctgcgtctgtgtccctctttccacgtcaacctgctttttccaggcggcggtagggcttgggaaggtgaaggaaaaacaaggagaaagtgtcattgccaaataaataccgggaatatcctcccaaataaaatttgggaagaaaaaacaggaaggataggaggtccctgcaaagcaaattaaaga

SEQ ID NO: 96263 - DNA, 600 bp, Chicken  19866894889710_2
atgggagcctggcagccactggggcagggatggctgtgataccagaaggatggcagggccaggcccagccggcgccacgacgtgcacccaccattttgtccccgcgccgggccggaaggagcgaggcactgtgcgcacgctgtatttatagtcgccccgcccccggtgacgcaacacgcggagtgaaagatctcgcgagagcagggggcgcgcggcgctacgggaggggagcggggtcagartggtgacgaaggcgcagcacggtcgcgctggaatagcgagcgccatcttgtcccgggraaggcattgacggctcttggatgctcttctcatcttctccacctgctgcgcctgcgcgcctgcgtctgtgtccctctttccacgtcaacctgctttttccaggcggcggtagggcttgggaaggtgaaggaaaaacaaggagaaagtgtcattgccaaataaataccgggaatatcctcccaaataaaatttgggaagaaaaaacaggaaggataggaggtccctgcaaagcaaattaaagaaaaagctgataataagaatttcagtcgcaaggatctggttaaacaaacttacacacag

SEQ ID NO: 96264 - DNA, 599 bp, Chicken  19866894889715_1
  misc_feature (1)..(79): n is any nucleotide
nnnnnnnnnnnnnnnnnnnnnnnnnnnnnnnnnnnnnnnnnnnnnnnnnnnnnnnnnnnnnnnnnnnnnnnnnnnnnnntaattatttctctcaccaaagaaattgcaaagagaaagcaatcacttgcttatagctcctaaacctctagctctccaaaataacgatgacgtattacattcatagggcattctgaccacacaaggttttatccattacacagcacaggggaaagtaggtgacagaaatgaagcagaggctggtatttagccaaggggcagtgctaacatccacattcaccrtttggctaccctccaaaattctctactatttagtaaatatttctggaaatgctgtttggcattagatagcctgaccctgtaatccatactcaactaaaaatcccacataagccaagacattttgtaacaaaaatgcatcaatcactggagttctacatttacacattgactacaatggggcctgaaatgccactgaaaatacagaaatctcccaaactaaaacaagagagcaaagggtgatggatcataacaactgatatcacagaaataaataggttggctttgcctctatagtgctt

SEQ ID NO: 96265 - DNA, 600 bp, Chicken  19866894889886_1
ggtagaattggcacaggcatcaggtaaggaatttctatagggtaggggagagcctagcacaggacagaaggagtgtgcagactgttggaaatgttgtcctcctgtctccttaaaaggtaaagaacatacccaaagacaatgggttgctaacagacgttgtatggaaacataatggagcaacagcttcggaccactgtgagcctgagatgctcaaccagtgagtgccaggagaggctttgcctgtgttggacccaggggagaaaacaaagtggatttcactgatcaggagcgcaatttctsccttggcagtagggggcgtgcgcccgttgttgcaatcatggacaaactgctcttcacagagatctcggcctgattcgaaattgtagacccggagcgtgtttctcacaaagctgcaaacatcagcccgagctccaaggtgggcgaggagggcccagggagcaaagggcttcaccgtggtgctgggcataagagacataacactgctttctgtgtgtgctgctgcatgcaggacagcctggcattgcagtggtgagtaaaactggctttgatcagagatagtgtcctgatcaactacttgtt

SEQ ID NO: 96266 - DNA, 599 bp, Chicken  19866894889890_1
  misc_feature (1)..(118): n is any nucleotide
nnnnnnnnnnnnnnnnnnnnnnnnnnnnnnnnnnnnnnnnnnnnnnnnnnnnnnnnnnnnnnnnnnnnnnnnnnnnnnnnnnnnnnnnnnnnnnnnnnnnnnnnnnnnnnnnnnnnnnaagaagacttagcatttctttcagatcccaagtttagggctaactttggagaaagaaggtgccattaagtgactgtttgtgacattgggagtggacatgggctacctgagaacaaagtcacatagaattggcagcgctgaccagggtactgacagaaaactgaggtgatatggaatgaatcrcaggcagatcaaagactaaaagtaaaaaaatgtgtgattttacttggggtgaggacaggtagagttactgctctttgaataaacacttcattcagattccttactttgagtgaagagtttttcatggagtggatttacttactgcaaaatgagttaataaaatgaaagtcatctgctgcaagtagagtcttttcaaaaacagcagaaaaacaaaactaggtgcagatctctggggaaatttcagtataattctactcctagcaccagccaccagtcagagttacctccactaaactttt

SEQ ID NO: 96267 - DNA, 599 bp, Chicken  19866894889982_1
  misc_feature (1)..(91): n is any nucleotide
nnnnnnnnnnnnnnnnnnnnnnnnnnnnnnnnnnnnnnnnnnnnnnnnnnnnnnnnnnnnnnnnnnnnnnnnnnnnnnnnnnnnnnnnnnntgatttttaaacagtgtttaagaaattgctgacgtggtaacagaactacctgagctttcatttacatttatcctcaattggaccaagtttccctgcaaaggatattatgataacaatttagattattttatagttaaattagacaaatgaattatttttataaaatgtttctaaagggaccaatttccactgaaacaaaaataaaaaawttccactatttcacttgtgaagagagaaaaatctacaagaaatccaactgtttygtgtgcttgtgatagttatagggctgtttgtgtatgaatttgtttaggcatttatttctttgtttagttcaagttttgaattgaatgtttatgttgggtcttaataacatttctgtttaccttgtgtctttcttgacaacttaaccttttccaacagtaactataaattatacaattatattacagtattaattaattaaagatattagtagatgacctataattagtataaaatgattacatga

SEQ ID NO: 96268 - DNA, 599 bp, Chicken  19866894889982_2
  misc_feature (1)..(37): n is any nucleotide
nnnnnnnnnnnnnnnnnnnnnnnnnnnnnnnnnnnnntgatttttaaacagtgtttaagaaattgctgacgtggtaacagaactacctgagctttcatttacatttatcctcaattggaccaagtttccctgcaaaggatattatgataacaatttagattattttatagttaaattagacaaatgaattatttttataaaatgtttctaaagggaccaatttccactgaaacaaaaataaaaaawttccactatttcacttgtgaagagagaaaaatctacaagaaatccaactgtttygtgtgcttgtgatagttatagggctgtttgtgtatgaatttgtttaggcatttatttctttgtttagttcaagttttgaattgaatgtttatgttgggtcttaataacatttctgtttaccttgtgtctttcttgacaacttaaccttttccaacagtaactataaattatacaattatattacagtattaattaattaaagatattagtagatgacctataattagtataaaatgattacatgaattattgttagwttcaacaatctggaattgagactccatttgtaacagctcatg

SEQ ID NO: 96269 - DNA, 600 bp, Chicken  19866894889982_3
cacttgtgaagagagaaaaatctacaagaaatccaactgtttygtgtgcttgtgatagttatagggctgtttgtgtatgaatttgtttaggcatttatttctttgtttagttcaagttttgaattgaatgtttatgttgggtcttaataacatttctgtttaccttgtgtctttcttgacaacttaaccttttccaacagtaactataaattatacaattatattacagtattaattaattaaagatattagtagatgacctataattagtataaaatgattacatgaattattgttagwttcaacaatctggaattgagactccatttgtaacagctcatgccagtattctttggtgtgattgcagtgtaagttacagtgaaataccccactgttgttttaagtgtgtacctctggcataaagattaattctgtgctgtacgtacaggcaaataatctctgcaaagcaggcgggggaccttatcctgggcatagagttccaaggaacatcaaacaagagaaatacaaccaagttcttccaccatggagcagatccccactagatccagctgcagagcagggccatggctcatctctcca

SEQ ID NO: 96270 - DNA, 600 bp, Chicken  19866894890048_1
tgtgggcaagaggttgagtggagaccccctgaagtcccaattagctgtgatcccataggatagctgtgttccagtggcaagagcttgcttgtcaggagagtgtactgagcattggagcaagcatctctcctgctgaggtaggtacaagctcacagcagagcccatccgtcttctagggacaaaacatcaacctacatgtgtagctcggggttgccatgcccccaaatacataagaatccatgctcattttacgctctttgttttaaactcattagtcacgctggctaaacatgttccatrccagtgcagatggtttttctccactgaaaaggctttcttctgtagggtggttaatctcctccccctccaggagtgtgcaggctcagaacccatcccgcacctacccccctttaattgcactgatattggaaagaaatgtcacttccattagggtcaaaatggaaatgccgaaatctcagcatgaaatttgtttgtcctccagctgatacacatggaaagtgtcagaatagggaattgatgggctgagcatcccccagccatgtacattcagaggcaacagccaaaccagcctggggacac

SEQ ID NO: 96271 - DNA, 600 bp, Chicken  19866894890082_1
cctgacttaacccttgtgcctcttaagagtggtagggagtatgcatttctaggagagtggctgaataatgtcttcagttacagacccagcctaaacatgttctagacagatagtgatgcctattgtgttttcatcctcttgtgatactgttgctatccactaaaaaaacacgtagtcaggagtaagtagagctcatctgtcttttctgttttcattttcagtaggcttatgtgctctgtgttacaagtcacattttgtgttggtccactcgatccatgctagtattttatagtggagccyctgtagtgaggaatacctttcccatctggaagtggcacagcaatgcatctaaattcccagtgctttgaattcactgaatgggataaaagggcaaatgtaaggtgtcaattaggtagcccgttacccaagtctgaatgacttatcccagccaaagcagagcgcagtagtagtgaggggaagttactcagaacctatctctcctgttcgaatttcatatctaattagtgctttaaaatatggggggatgtgctgtgggggaaggcagttcacgcaattacaagtcagaaatgtaggcaggta

SEQ ID NO: 96272 - DNA, 600 bp, Chicken  19866894890110_1
atgccatatccacattcttgtccttgcaacaagaattatctattttacttatcagtgaagtgcccaataaagtttgtgccaggtcaagtagttcaggaaacacattccaggtaccactattcagtgatgaaatttcttcatgactcatcgaggattttctcacaggaatttatagactagtatatgttattcttttcccttacagtagcatcccttagtttccttcaaaagtcattctgcactagctgcagttgtccaaaactgtgcagtaatagtcttctgaagcagtgttcctgttaytcctgtgctagtgccagtgggtaccatttcagcaccgcagctgcagagttgcatcagagacctttaaactcgctgcagccattagcattaggcaacgtagaaggtgaaacagccatctgtgacctgctggagaaaggagataaagaaattttgtgaggtattacctctccttttctctgtaggatgacctacagagcaataagctttgcaggaaaactgcaagagaatattactcttgaaatatctcccacttaggtattattcatgctgccttccaggttatcttttcagtgtgtccca

SEQ ID NO: 96273 - DNA, 600 bp, Chicken  19866894890239_1
aaagtcttagaattcattactgttttggaaggtacagtgcctttgtcattaacataaatatggatttgaccttacttaggacttaccatcacacctttctctccaggaggacctactggtcctggactgcctccgctctccctttaatgaaaaattaaaaagaaaataaaagtgagtgttctttccctgaaacattccttgtctactattcctagacctgctctaacaatacgacagtggtgcaagaggacttttattaggggtgtcatttacaatctacaaggaacttactgctaaaargggagtgcataacacctctgctttagtgactttccttttcttagaagtctgcagaagagatttggtacttcaccagtctttctgagctgctactagcagatcccttctctctgtcgcctgcaccacatttatagttatgtttttaatctataatcctcacctcaataaacattttttttcctctctccctcatttcttcagcatgttttgagaaaagaacagatctaaaaggaaggcagccctgcaacagctgtacaagcaatgggaatgggcggcatagagaaggtctaattcttgtct

SEQ ID NO: 96274 - DNA, 600 bp, Chicken  19866894890274_1
gctagattgtcaaagtacagtaaaatacagcctggtttgttttactgctttcttagttgattaatatattattaccttttttaaaacttttattatcattattattatgagcaaaaacatgaactcatacataaaaatttgcaggaatcttttatttataatacacagtaaattaaaatcattattcacagccagaaaacctccaggtattccaacaaataacatccataaatagaagggaatacaaggtatgccacaacctgtagacaccaaaagagtaagtaggagagctaaggggargaaatacttctcctgtaagatttccagaacaggaagaagggaaagaattttacwcaaaggcaaatagaactaagaacgttgagtgttgaactaacaatgttgttaagatcagatgaaaataactgtagtgaagtgttagaaccgcttcaattatggaatccccatccaacttcagcctcaacgtyagcactgcagagcagttctttctggatcacagtcacgctgctatcaggtagtatttgataacttgcagctcccaacattgaatgggatattttttttcccctgaaatgaaccagg

SEQ ID NO: 96275 - DNA, 600 bp, Chicken  19866894890274_2
agttgattaatatattattaccttttttaaaacttttattatcattattattatgagcaaaaacatgaactcatacataaaaatttgcaggaatcttttatttataatacacagtaaattaaaatcattattcacagccagaaaacctccaggtattccaacaaataacatccataaatagaagggaatacaaggtatgccacaacctgtagacaccaaaagagtaagtaggagagctaaggggargaaatacttctcctgtaagatttccagaacaggaagaagggaaagaattttacwcaaaggcaaatagaactaagaacgttgagtgttgaactaacaatgttgttaagatcagatgaaaataactgtagtgaagtgttagaaccgcttcaattatggaatccccatccaacttcagcctcaacgtyagcactgcagagcagttctttctggatcacagtcacgctgctatcaggtagtatttgataacttgcagctcccaacattgaatgggatattttttttcccctgaaatgaaccagggaggaagagaggagttattaacagcactcctaggaaagccaaaacggaagaaaa

SEQ ID NO: 96276 - DNA, 513 bp, Chicken  19866894890274_3
tcacagccagaaaacctccaggtattccaacaaataacatccataaatagaagggaatacaaggtatgccacaacctgtagacaccaaaagagtaagtaggagagctaaggggargaaatacttctcctgtaagatttccagaacaggaagaagggaaagaattttacwcaaaggcaaatagaactaagaacgttgagtgttgaactaacaatgttgttaagatcagatgaaaataactgtagtgaagtgttagaaccgcttcaattatggaatccccatccaacttcagcctcaacgtyagcactgcagagcagttctttctggatcacagtcacgctgctatcaggtagtatttgataacttgcagctcccaacattgaatgggatattttttttcccctgaaatgaaccagggaggaagagaggagttattaacagcactcctaggaaagccaaaacggaagaaaaaaaaatctcaagagatatgcacacacatacaggagagggagcat

SEQ ID NO: 96277 - DNA, 600 bp, Chicken  19866894890309_1
tggcctttggcctatgctgtccccaaaccatgcctgggccgtgttcaggagagaactagttgttggagccaaaccatgccaggaatcattgtagcagtttgactctataaataattgagtttcagtgtctgaaaacattatgtgacactgtttaatttattggtagagatgaagcccactattctgtccaggaacagaaatcttgaacaccttagagtgccctgagaaaacggaaatgctgcactatccaccagacacaagggaaggctgaagaaatggaggaggtcatgacgttacctraagttacaccaacaatcactgattactgagtgtaaagaatgtctgttttttgaaataaaaagtcaatcttgcattagctaacacatcrgcttgaagaggtgcacctggagctgaagaccagggaaagggcagctggttggttacctctctctatgcagaggtcaagtgacatttccatttctgctgttgctccggaakctggctgggaaaggtaagttcaattcacaggatggatgaggttggccaggatctctaggtctctctggtccccctgacctagcagggctacccagagcagag

SEQ ID NO: 96278 - DNA, 600 bp, Chicken  19866894890309_2
ttgtagcagtttgactctataaataattgagtttcagtgtctgaaaacattatgtgacactgtttaatttattggtagagatgaagcccactattctgtccaggaacagaaatcttgaacaccttagagtgccctgagaaaacggaaatgctgcactatccaccagacacaagggaaggctgaagaaatggaggaggtcatgacgttacctraagttacaccaacaatcactgattactgagtgtaaagaatgtctgttttttgaaataaaaagtcaatcttgcattagctaacacatcrgcttgaagaggtgcacctggagctgaagaccagggaaagggcagctggttggttacctctctctatgcagaggtcaagtgacatttccatttctgctgttgctccggaakctggctgggaaaggtaagttcaattcacaggatggatgaggttggccaggatctctaggtctctctggtccccctgacctagcagggctacccagagcagagtgcccagccccatatcccagtgggactggttatctccaacagacagaatctttacagtctctctcagttccttatctagatcttaaaa

SEQ ID NO: 96279 - DNA, 600 bp, Chicken  19866894890309_3
aatcttgaacaccttagagtgccctgagaaaacggaaatgctgcactatccaccagacacaagggaaggctgaagaaatggaggaggtcatgacgttacctraagttacaccaacaatcactgattactgagtgtaaagaatgtctgttttttgaaataaaaagtcaatcttgcattagctaacacatcrgcttgaagaggtgcacctggagctgaagaccagggaaagggcagctggttggttacctctctctatgcagaggtcaagtgacatttccatttctgctgttgctccggaakctggctgggaaaggtaagttcaattcacaggatggatgaggttggccaggatctctaggtctctctggtccccctgacctagcagggctacccagagcagagtgcccagccccatatcccagtgggactggttatctccaacagacagaatctttacagtctctctcagttccttatctagatcttaaaattaggtttcctttgctgtaaattacaatggtagggacaaattctgctccaagttattctgacacggtgtgcagttctgggctcttcagtaaaaaagagtcaggggtcttc

SEQ ID NO: 96280 - DNA, 599 bp, Chicken  19866894890355_1
  misc_feature (1)..(124): n is any nucleotide
nnnnnnnnnnnnnnnnnnnnnnnnnnnnnnnnnnnnnnnnnnnnnnnnnnnnnnnnnnnnnnnnnnnnnnnnnnnnnnnnnnnnnnnnnnnnnnnnnnnnnnnnnnnnnnnnnnnnnnnnnnnnctgtgctgagcccttggacaagagtggtggcacggccagcagcaggcactactccgcttctgacagacgcattccaggaacatctgtgagatggcatttgagatgtgcctggactatagattttggcgtgtgtaaactgcgaaacgggccacgaaacacaaaatactgctttcatytctgtattcctaatataggtttcatcattacagcaaacttttattcccttcttgaactgcacttcatttaataaagtatagaaaatttgtccaggtagatacaccagctttctgattaatgacacttgtacaactggtggtatgctgaatcttaatgaagtctggaaaacaattattttgcgacttctgtggtgaagaactagagaaacaggattggtttttcragacaatgcatttttatgcattaagatattttagtgcaattgagaagcccagcctttgtagtcagtgagagttac

SEQ ID NO: 96281 - DNA, 600 bp, Chicken  19866894890355_2
agatgtgcctggactatagattttggcgtgtgtaaactgcgaaacgggccacgaaacacaaaatactgctttcatytctgtattcctaatataggtttcatcattacagcaaacttttattcccttcttgaactgcacttcatttaataaagtatagaaaatttgtccaggtagatacaccagctttctgattaatgacacttgtacaactggtggtatgctgaatcttaatgaagtctggaaaacaattattttgcgacttctgtggtgaagaactagagaaacaggattggtttttcragacaatgcatttttatgcattaagatattttagtgcaattgagaagcccagcctttgtagtcagtgagagttacacttgtttattgtgtctgaataaatttggcacaagagtgctctcgggctctgctctaaggttcatctatacttgggctgtacaatctgcatttctatatttcgaaatatttaggttcatcgataaagctaaagggcagtgaattaaaaatcaatacaaaggcagacttcttaaggcaacagagagggagttcatggaatacataattgctagaattcattaaaga

SEQ ID NO: 96282 - DNA, 543 bp, Chicken  19866894890584_1
atccagcagccggggcgagggggtgggcactgcctgaggaatgccataatctcagcccggttcgctgctgtatagcaggacactgagctggctccacttggcgattagtgccgtcgtgctgcccagggctggggctgctgcacgtcccttctggcaccggactggcagaccacagcagcagcgcaccacgcgtgggcacgtggcagatttctactgatccggattaaggtggcacctccgggtcagagcccattgccctgcgctggtttggctgcatgcaaacaaggggctcagagcccscgctgggggagagacagcgccccccaaacagcaccagagcagctttgtgccaccccttcctgcatggcagcacaccaaggtgcattgataaagatccaccatccttcaggccagctcctacccctatctccctctccctgcctgttagctcttctaattgttaggccaattaagcaagcgctgctgcaggtgggttctgtaccatgagcaacaggtaatgggaggctcccacccagctcaacg

SEQ ID NO: 96283 - DNA, 481 bp, Chicken  19866894890620_1
accttccagcacttctttccatgcaggcaagcactaagctgtccatacttattatctctactagcactacagcttcattttgttttttacctccggaaaaaaagaaagaaagaaagaaaagttttcattcgtcttcctataaggtgcattgagttgtatttaatatacacattccagcttaaatccagccctctacagtcccacccaagaaggcctctcagcatcccatcttggccagcctcacaaccaccatacagctcagcacacctctgcagacacaggctggctccctccaacagrgractgctgaggttggaaaagacctctgagctcattaagtccaaccccaacccatccccgctgaccgtgcccctcagtgccacatccctacggctctgcaacacctgcagggacggcagccccagcacctctctgtgcagctgtgccgctgcctcaccactctttgggagaaggaactcac

SEQ ID NO: 96284 - DNA, 479 bp, Chicken  19866894890620_2
cttccagcacttctttccatgcaggcaagcactaagctgtccatacttattatctctactagcactacagcttcattttgttttttacctccggaaaaaaagaaagaaagaaagaaaagttttcattcgtcttcctataaggtgcattgagttgtatttaatatacacattccagcttaaatccagccctctacagtcccacccaagaaggcctctcagcatcccatcttggccagcctcacaaccaccatacagctcagcacacctctgcagacacaggctggctccctccaacagrgractgctgaggttggaaaagacctctgagctcattaagtccaaccccaacccatccccgctgaccgtgcccctcagtgccacatccctacggctctgcaacacctgcagggacggcagccccagcacctctctgtgcagctgtgccgctgcctcaccactctttgggagaaggaactcac

SEQ ID NO: 96285 - DNA, 599 bp, Chicken  19866894890724_1
  misc_feature (1)..(212): n is any nucleotide
nnnnnnnnnnnnnnnnnnnnnnnnnnnnnnnnnnnnnnnnnnnnnnnnnnnnnnnnnnnnnnnnnnnnnnnnnnnnnnnnnnnnnnnnnnnnnnnnnnnnnnnnnnnnnnnnnnnnnnnnnnnnnnnnnnnnnnnnnnnnnnnnnnnnnnnnnnnnnnnnnnnnnnnnnnnnnnnnnnnnnnnnnnnnnnnnnnnnnnnnnnnnnnnnnnnnaaaagtcttgtatgactcccaggagaagctcagcatgagtaagcaattcctagcaccatccaaagctactttccagtaagacataatrtttttttgtccaatcttatgattcctgccactccccttcccaacaaawatataattgttattatatcccctacatcaggagacttaatgactatcatacctaacatttcttaggaataatgtatgtcatttttttccatgccatattttgttataatgggtcccagataagtttaatgaggacttcattcaatccagaatatgaaaatacrtttggaaacaaagcaaagcgtttccaagaaataagtgccttcactcatcacaaataacacaattatttgaatattttacagcaaatcc

SEQ ID NO: 96286 - DNA, 599 bp, Chicken  19866894890724_2
  misc_feature (1)..(164): n is any nucleotide
nnnnnnnnnnnnnnnnnnnnnnnnnnnnnnnnnnnnnnnnnnnnnnnnnnnnnnnnnnnnnnnnnnnnnnnnnnnnnnnnnnnnnnnnnnnnnnnnnnnnnnnnnnnnnnnnnnnnnnnnnnnnnnnnnnnnnnnnnnnnnnnnnnnnnnnnnnnnnnnnnnnnaaaagtcttgtatgactcccaggagaagctcagcatgagtaagcaattcctagcaccatccaaagctactttccagtaagacataatrtttttttgtccaatcttatgattcctgccactccccttcccaacaaawatataattgttattatatcccctacatcaggagacttaatgactatcatacctaacatttcttaggaataatgtatgtcatttttttccatgccatattttgttataatgggtcccagataagtttaatgaggacttcattcaatccagaatatgaaaatacrtttggaaacaaagcaaagcgtttccaagaaataagtgccttcactcatcacaaataacacaattatttgaatattttacagcaaatccacaggagacaggaatttgttctcagtgaatagaaagaatttcctagtc

SEQ ID NO: 96287 - DNA, 599 bp, Chicken  19866894890724_3
  misc_feature (1)..(1): n is any nucleotide
naaaagtcttgtatgactcccaggagaagctcagcatgagtaagcaattcctagcaccatccaaagctactttccagtaagacataatrtttttttgtccaatcttatgattcctgccactccccttcccaacaaawatataattgttattatatcccctacatcaggagacttaatgactatcatacctaacatttcttaggaataatgtatgtcatttttttccatgccatattttgttataatgggtcccagataagtttaatgaggacttcattcaatccagaatatgaaaatacrtttggaaacaaagcaaagcgtttccaagaaataagtgccttcactcatcacaaataacacaattatttgaatattttacagcaaatccacaggagacaggaatttgttctcagtgaatagaaagaatttcctagtctatggttcaaatctgaactaagaaatattaaattaggtgatctgagcagcagtaatatttttagataactttcataagaatagctgcatcctgtccttctgtcagtttttaaatwaaaaaataaaataaaataaaataaaataaaataaaataaaataatcca

SEQ ID NO: 96288 - DNA, 571 bp, Chicken  19866894890724_4
ccagataagtttaatgaggacttcattcaatccagaatatgaaaatacrtttggaaacaaagcaaagcgtttccaagaaataagtgccttcactcatcacaaataacacaattatttgaatattttacagcaaatccacaggagacaggaatttgttctcagtgaatagaaagaatttcctagtctatggttcaaatctgaactaagaaatattaaattaggtgatctgagcagcagtaatatttttagataactttcataagaatagctgcatcctgtccttctgtcagtttttaaatwaaaaaataaaataaaataaaataaaataaaataaaataaaataatccagacagttttactattttctgacccttgggtcaaccyttagtctgatttagtaactctgctgtaagaacttgagtgtgctaaagaaatatcatagaagtaccatacaatttcccaaatcagaagtggtatagctttgcaagcctggggcaagtctgctagtacagattgtcacactactgctgctgtgcttactccaaaactgtgctgacttaccctcattaag

SEQ ID NO: 96289 - DNA, 487 bp, Chicken  19866894890724_5
tgccttcactcatcacaaataacacaattatttgaatattttacagcaaatccacaggagacaggaatttgttctcagtgaatagaaagaatttcctagtctatggttcaaatctgaactaagaaatattaaattaggtgatctgagcagcagtaatatttttagataactttcataagaatagctgcatcctgtccttctgtcagtttttaaatwaaaaaataaaataaaataaaataaaataaaataaaataaaataatccagacagttttactattttctgacccttgggtcaaccyttagtctgatttagtaactctgctgtaagaacttgagtgtgctaaagaaatatcatagaagtaccatacaatttcccaaatcagaagtggtatagctttgcaagcctggggcaagtctgctagtacagattgtcacactactgctgctgtgcttactccaaaactgtgctgacttaccctcattaag

SEQ ID NO: 96290 - DNA, 600 bp, Chicken  19866894890743_1
agaattaccaatagctagacgtgcaaaattaaaacaaactggtgattctagtttcaggtagtgactctactggtttcatacagcagagagtgtacacagggagtgttacgtcgtagtgccagcagtagctttcttagcaccactcagacagccgcaactgattgatttttgttcctctaattttgactccttttgatcagtgggaaaaacaggtccctctaggccaagggaccaaacccagtatctggcagtcgcgtctcaggcctggttctccccagactacattgcgagtggttgtaycatgtgtgactcatggcctaattaaatagtcttaaaaaggacgcaattccccacattagccgcatttttttacgaagcatatccaagtattttctgtctcttggaaagtcagataagtggtgttaaatcgacatcaggttgccaaaacacagcgctgyctgccccgcgcgtgcagaaacaggctgtcctgtgagcatgctggacggctgccgaggacggctggctcagaaggggagacttctcaggcttatcaacaagggtgtgcagctaagtgctaactgggccctcacttcttggatc

SEQ ID NO: 96291 - DNA, 562 bp, Chicken  19866894890743_2
tgattgatttttgttcctctaattttgactccttttgatcagtgggaaaaacaggtccctctaggccaagggaccaaacccagtatctggcagtcgcgtctcaggcctggttctccccagactacattgcgagtggttgtaycatgtgtgactcatggcctaattaaatagtcttaaaaaggacgcaattccccacattagccgcatttttttacgaagcatatccaagtattttctgtctcttggaaagtcagataagtggtgttaaatcgacatcaggttgccaaaacacagcgctgyctgccccgcgcgtgcagaaacaggctgtcctgtgagcatgctggacggctgccgaggacggctggctcagaaggggagacttctcaggcttatcaacaagggtgtgcagctaagtgctaactgggccctcacttcttggatcgaaaaaccagtgccaacagaaatacctttccaagccgaggctctcaaatgaaacacctaattttgattgtcttggtacctgatgttttacaaccacaaactgttgtgaggctattggtaa

SEQ ID NO: 96292 - DNA, 600 bp, Chicken  19866894890866_1
gagtttgtctcataaaaatgctattcccatacacgtggttacctgcactcttacttccattactttcagaactttaaaaaaccaccccaaaataactttcagttttcatatatttttcatatctaagcctgcacaaatcaaaactttccctcccttttcacccattatagtatattttggcataatctctgcatttttatctcaccttaaacatcggtgaaagcctaacagaccaatcaatgtatgtgaactaacccattttgtaacatgatgatgaaaaatagtattttctgatgcacmaagatttttatcttaagtatacatcattttcaagggctagcgcagagtacagagtaagatcaccagatctttcttcaatctgtgacatacacatatacagacatatggacaaatacatgcatttacacaggacagtcaggactttctaaagcacagcttcgtgtccgtggtaaaggccagcatgttatctacactattcccatcactgggcaaatccatgagaaaagagggcagtctcagtccactgactcatcctgctgaagaagtacgccctgtgtattctcatccgtaccaggtggg

SEQ ID NO: 96293 - DNA, 600 bp, Chicken  19866894890949_1
aactcggtgcctgcgaggagaatttggaaaaaaaaaaaatcaggctataaataggatgctaatttttaactgagagagtaattaaccactagaacaacttcccaaggacagcagtggattgccaattacaggcaattttaaagtgaagaccagatttatttattttaaagatatgctccaacaggagctaattgcatcaactcctgctgcctgagttgtactgaagctcagacaaagcgatccaagcggtctcttctggcactcagctctgatcagagcagacagcaatccagaagaaaygtaggaagggcaaagcaaacaatttcgatygcacctatgcagataccatcagtgctctgagaagggtcawcattccaactcagcatcaatgcaatagaaactcagctgtgtggtagcatcaattcagtatgtagcccattcaatttcaccttcatggtattagagaacagaaataagatggggcagcactaccttagattgtatttattttgtaaaaggtgctaaaagtgattttrtaaggtgcatgtgaggctcctcatccttttggtggctggttttctaccacattatgttttctgc

SEQ ID NO: 96294 - DNA, 600 bp, Chicken  19866894890949_2
aaaaaaaaatcaggctataaataggatgctaatttttaactgagagagtaattaaccactagaacaacttcccaaggacagcagtggattgccaattacaggcaattttaaagtgaagaccagatttatttattttaaagatatgctccaacaggagctaattgcatcaactcctgctgcctgagttgtactgaagctcagacaaagcgatccaagcggtctcttctggcactcagctctgatcagagcagacagcaatccagaagaaaygtaggaagggcaaagcaaacaatttcgatygcacctatgcagataccatcagtgctctgagaagggtcawcattccaactcagcatcaatgcaatagaaactcagctgtgtggtagcatcaattcagtatgtagcccattcaatttcaccttcatggtattagagaacagaaataagatggggcagcactaccttagattgtatttattttgtaaaaggtgctaaaagtgattttrtaaggtgcatgtgaggctcctcatccttttggtggctggttttctaccacattatgttttctgcctgtgtccaacatgcaactattagcctttt

SEQ ID NO: 96295 - DNA, 600 bp, Chicken  19866894890949_3
tgagagagtaattaaccactagaacaacttcccaaggacagcagtggattgccaattacaggcaattttaaagtgaagaccagatttatttattttaaagatatgctccaacaggagctaattgcatcaactcctgctgcctgagttgtactgaagctcagacaaagcgatccaagcggtctcttctggcactcagctctgatcagagcagacagcaatccagaagaaaygtaggaagggcaaagcaaacaatttcgatygcacctatgcagataccatcagtgctctgagaagggtcawcattccaactcagcatcaatgcaatagaaactcagctgtgtggtagcatcaattcagtatgtagcccattcaatttcaccttcatggtattagagaacagaaataagatggggcagcactaccttagattgtatttattttgtaaaaggtgctaaaagtgattttrtaaggtgcatgtgaggctcctcatccttttggtggctggttttctaccacattatgttttctgcctgtgtccaacatgcaactattagcctttttccacttctcagagccttttgaacctgtaaaccaatttca

SEQ ID NO: 96296 - DNA, 600 bp, Chicken  19866894890949_4
gcgatccaagcggtctcttctggcactcagctctgatcagagcagacagcaatccagaagaaaygtaggaagggcaaagcaaacaatttcgatygcacctatgcagataccatcagtgctctgagaagggtcawcattccaactcagcatcaatgcaatagaaactcagctgtgtggtagcatcaattcagtatgtagcccattcaatttcaccttcatggtattagagaacagaaataagatggggcagcactaccttagattgtatttattttgtaaaaggtgctaaaagtgattttrtaaggtgcatgtgaggctcctcatccttttggtggctggttttctaccacattatgttttctgcctgtgtccaacatgcaactattagcctttttccacttctcagagccttttgaacctgtaaaccaatttcagccagatgcagcagaagacattatcaaaggaattacatcctctgggcaaaccaggtaaaagctgaagttcaacaaacgacctagctgaagaaaggctgcagagtgacacagccctggggaacccagggaggagggagacagaaataaaactgctccagtgtgacac

SEQ ID NO: 96297 - DNA, 589 bp, Chicken  19866894890975_1
aagctgagttttttaagggctaagtcgttttcctgcagtaagaagataggagtctttggcagagaatcactgtgcaacttgattcctggctgtgacgtatttaggctttcattatcacctgctgcccacacgtatgtggcataaactcctcagagaacctgtgaagaaatgcatctttagttggctgacctggagcacttctttgttgatgaaccctcagaactgctggaagaactgtttcacgccaggccagtgtaacctcagactgaacacacagcactgatttgccaaattcaaagrctgacatattttaaggtgtaagttgggttttcaatgtacgtgcaacatgataacttggtatcttgtacaagtacaatgcaagcaattggtgctgcakmtaaagccaacaactccaagaaagcagagatttaatagactgctaattgctttgatacctttgctacccgtcttataaaagactacaggtctgtgtttccttatgacctgcgatactgtcactgtaagcaatgaaagctatcaggtctccttttttcttctctttttcctctgtccagttctcctggggatg

SEQ ID NO: 96298 - DNA, 492 bp, Chicken  19866894890975_2
tatttaggctttcattatcacctgctgcccacacgtatgtggcataaactcctcagagaacctgtgaagaaatgcatctttagttggctgacctggagcacttctttgttgatgaaccctcagaactgctggaagaactgtttcacgccaggccagtgtaacctcagactgaacacacagcactgatttgccaaattcaaagrctgacatattttaaggtgtaagttgggttttcaatgtacgtgcaacatgataacttggtatcttgtacaagtacaatgcaagcaattggtgctgcakmtaaagccaacaactccaagaaagcagagatttaatagactgctaattgctttgatacctttgctacccgtcttataaaagactacaggtctgtgtttccttatgacctgcgatactgtcactgtaagcaatgaaagctatcaggtctccttttttcttctctttttcctctgtccagttctcctggggatg

SEQ ID NO: 96299 - DNA, 491 bp, Chicken  19866894890975_3
atttaggctttcattatcacctgctgcccacacgtatgtggcataaactcctcagagaacctgtgaagaaatgcatctttagttggctgacctggagcacttctttgttgatgaaccctcagaactgctggaagaactgtttcacgccaggccagtgtaacctcagactgaacacacagcactgatttgccaaattcaaagrctgacatattttaaggtgtaagttgggttttcaatgtacgtgcaacatgataacttggtatcttgtacaagtacaatgcaagcaattggtgctgcakmtaaagccaacaactccaagaaagcagagatttaatagactgctaattgctttgatacctttgctacccgtcttataaaagactacaggtctgtgtttccttatgacctgcgatactgtcactgtaagcaatgaaagctatcaggtctccttttttcttctctttttcctctgtccagttctcctggggatg

SEQ ID NO: 96300 - DNA, 580 bp, Chicken  19866894891090_1
aaatccatatcgcaagtctcacacagggtctttcaagttactggggtaaaacagatccaatgtcttctccttcacctgatggttcaggtgtacaggcttgccctcctgatagtggtgtagaagttgaatgaaaacaatctttgcaactgatcatgctaagcctgcagttcttaacacctacttctatgaaagaacaaatctatcagcaggtgggagaaatgagaaatacaattgagaactgaacatggtattcacaagcatctccacaatttctgcttacagtcacagtcagttccaaayaccaggacctcaagatctcaaacttcaatattcattactgatgctgatcccaggcagccaaatcwatattaagacacactgatacattctgaagcacagcaatattccaagatgttcccatctcagaggatgacagtcaaactgtcagtttaaactgacagttaaaaagatggtctttgaggtcccttccaacccaagccattctatgattctatgtaatattccctgcaggagatttgtttcagacaatcagtacagtgcccacatgaagaccaaaagt

SEQ ID NO: 96301 - DNA, 515 bp, Chicken  19866894891090_2
tctccttcacctgatggttcaggtgtacaggcttgccctcctgatagtggtgtagaagttgaatgaaaacaatctttgcaactgatcatgctaagcctgcagttcttaacacctacttctatgaaagaacaaatctatcagcaggtgggagaaatgagaaatacaattgagaactgaacatggtattcacaagcatctccacaatttctgcttacagtcacagtcagttccaaayaccaggacctcaagatctcaaacttcaatattcattactgatgctgatcccaggcagccaaatcwatattaagacacactgatacattctgaagcacagcaatattccaagatgttcccatctcagaggatgacagtcaaactgtcagtttaaactgacagttaaaaagatggtctttgaggtcccttccaacccaagccattctatgattctatgtaatattccctgcaggagatttgtttcagacaatcagtacagtgcccacatgaagaccaaaagt

SEQ ID NO: 96302 - DNA, 600 bp, Chicken  19866894891167_1
attatccctgtgtgacaaaattgggagtgctgccaacagtttgctaccacagaggtcatctgatgagagcaacgtgcctgaaggaaaagcaggagacttctaatagctgagggaagataagctaatctaaagaacttctgaaaaatatgaagataacaaaagccattcatatataggacagggtctgaacagttttctgtgtagcatatgctttctgaatgttcccacattgatcatcaccttgatcaccacctacagctgagtcctcaacaggaaaacctgatccacagaaaaacctgmaaatgacctagaagtgaaataactaccaaacttcctgtctaagcaactggaaagtattctgttgaggggcaaatgtgtcctccatgtgtttggacaagtctagtctgcagaggtttacatgtgaattgttaaaatcatacattttcattatctcttacagtaacaataagaaaagaatgccaaatccatcatgatttccattattacttagaacaccactttcttgctgggttcagtacttcacactgaataatcaggacaccaagtcaaaacaaaatgtatcaacagctaaattttaaa

SEQ ID NO: 96303 - DNA, 600 bp, Chicken  19866894891195_1
gacattcttgtagggtacagtgggacatatgggggtgaatgctttgctttcgccgaaagggtcttcagtttctgaatacatactagagttcagcatcagaattggatacgagggaaattcagtatctcccattttactcagagatactgagacaccagggctataggaatatctcactgtcagtctgcacacagcagaggtaggatgaggattcacaatacctgattttctatctccagttcaaacaaagaattcccactgctatttcaccattagaatgagattccttcacttgaaackccaaagtgcaggttggggtctttccatgagtgtgtaatgtcacaaatactagttttggcagtttcacatatacagggtaacccttccccatctctctctctcgctcacacacaaatcttactatacttacttaatgtgcaatcaaagctcccttccctctcctgtgcttagggcaagggtagacaggagcactgttatcaggccgtgcaaaaagtactgaaagtaatatagaaacaaaaatgaagtcattttatggagaggattaaatgattgcactaaaaacaaaaacaaaacaaacaa

SEQ ID NO: 96304 - DNA, 599 bp, Chicken  19866894891382_1
  misc_feature (1)..(80): n is any nucleotide
nnnnnnnnnnnnnnnnnnnnnnnnnnnnnnnnnnnnnnnnnnnnnnnnnnnnnnnnnnnnnnnnnnnnnnnnnnnnnnnncaaaaaaatctgggccacgtgctgcttggcttcatccccaactcttacactctagctccagattccttttcacaatgaaaagaaaaaaatgaaattgtctgtctctgaacaatatacaccacaagaactttctactagggagagacacactgtaatcaagagccagctgaaggctatgtgaaaatttacttctatcagaataaaggaaggctcagatctrtgctaaatatgacaaacacctgacacaggaaaaacgacagcctttaagataagttttcaaasaatgatagtttaggagctcaaaattggatcactatcaggagccaagtcacacaaggcccatattttaaatggtttcctctatgccttctcacagtgtcagcagcttaattaagtttgctttaaattctttcagcagaaaaaaataagtgatgcaattgaaccggcatcccagtgatttacagttatcttgtatgcagtctaaggcaagctcctaattaaattcagatgttttaaatt

SEQ ID NO: 96305 - DNA, 599 bp, Chicken  19866894891382_2
  misc_feature (1)..(18): n is any nucleotide
nnnnnnnnnnnnnnnnnncaaaaaaatctgggccacgtgctgcttggcttcatccccaactcttacactctagctccagattccttttcacaatgaaaagaaaaaaatgaaattgtctgtctctgaacaatatacaccacaagaactttctactagggagagacacactgtaatcaagagccagctgaaggctatgtgaaaatttacttctatcagaataaaggaaggctcagatctrtgctaaatatgacaaacacctgacacaggaaaaacgacagcctttaagataagttttcaaasaatgatagtttaggagctcaaaattggatcactatcaggagccaagtcacacaaggcccatattttaaatggtttcctctatgccttctcacagtgtcagcagcttaattaagtttgctttaaattctttcagcagaaaaaaataagtgatgcaattgaaccggcatcccagtgatttacagttatcttgtatgcagtctaaggcaagctcctaattaaattcagatgttttaaattgtttcagagaccaaggaagagagcaaaggtaccccagtgtttttgaaactgttcttcaaatt

SEQ ID NO: 96306 - DNA, 600 bp, Chicken  19866894891390_1
gatttgccaacgatcgggaataagttgctgatttttcttagtgtagtctcaaaagcaatacacatgaattaatgtcaagctacagttatatacttcattatactacattttcttttctgtgtcctatggaggacatatcagctaataaactgaggagcacatacagaaaactcaaggttgctttggaaatgccagaatcagggttgattgtacaactttatgtatctacgtgccagtccttgattattggatcacatactgtggtttatattgttgtgtttgttgttgttgtttcatttmgttttgttttacatttttccccacaagacttctgccttatttaatacctagtccttactaaattagttgttatctcctcaaatattttatccaccattctcacgctactcaagtgctatcctgtagggagagttactcttttacccttgagcatttcagtagtttgcatcactgaagtttcacaaacgataatcaatgcctactcaaaacatcttttccagataaggggagaatttcagcctcattttctagacagaaaattgagctagtaagagattaaggtcaaaagtatgtactaca

SEQ ID NO: 96307 - DNA, 600 bp, Chicken  19866894891458_1
aacttaaaattgtttgaaaatctagcaagtccagtctaagattcattaaatatgaatgtatgtaacctgatcgttcatcacttttccagatttgttaaaattactcttttatttaatgttttatttcatgttgccaggacaactgacttgaaagtgcagtgagcagtgtaatgttacagaagactaacagtctctgtgcttttgtgttttaaatcccttcccattttctacacagtctttttcttgcactcttgtcctggacatagactaataaatttaataatttcctttatttatagkttctagttagactccagggctgctggggctaggtgttttgcagtggtggatgcagcgcaaatatcacattcttaattgttccacagtactaattacagatatggaaggacagggaaaggaatagtggtttcttggaaaggttgtgaactttcctcagtagtacagtggatatcctgctatcctgctatacagagctagtctgctctgtaaatgaacaccactaaaatccatgagaaacctgcactaacttcagtttagcttatgaatatcagatagtatgtgtaactgatgctgcaaaca

SEQ ID NO: 96308 - DNA, 600 bp, Chicken  19866894891492_1
ttttgaaaaatcatttgtcacattcaactagctatgacaatttaaagattttctccagtttctttaagtcttttctttagcttttgcctgactgagacacctggctttgagtgtaaacagaatctaatttcttaaaatacatatgttaaagggtttctcagacatgttacagtttgacattgagaactaggttacacaagaacttgcactctaatttcagatttgatttcaagtataatggagtgaatatctgtttgcaattatattctttgataatatttatattttaaaatgaaaagytgatattctgttctctatttggcttgcaagggtttggattttgtacttgcttccaccagaatacatcacttcacctgtccactgcaggttgataataagaaatttcctaagtgcccaagaaaaagagggccacatgagtcagagtgaaagcaacaggtctttaaatgacttttggtacttaccaatrcagggaggagccaaggtagattttcagtagttcttggcactttgcactgtaatgtaatgaatctcatttccaatttggtccctgtgtagtttatattccttaggattttgtca

SEQ ID NO: 96309 - DNA, 600 bp, Chicken  19866894891492_2
taggttacacaagaacttgcactctaatttcagatttgatttcaagtataatggagtgaatatctgtttgcaattatattctttgataatatttatattttaaaatgaaaagytgatattctgttctctatttggcttgcaagggtttggattttgtacttgcttccaccagaatacatcacttcacctgtccactgcaggttgataataagaaatttcctaagtgcccaagaaaaagagggccacatgagtcagagtgaaagcaacaggtctttaaatgacttttggtacttaccaatrcagggaggagccaaggtagattttcagtagttcttggcactttgcactgtaatgtaatgaatctcatttccaatttggtccctgtgtagtttatattccttaggattttgtcacattttgaaaatggggttggaaacatatcagccttcataaagtacaacataattcgagaaaaatcattgcaaaagaaagtttcacagggaagtgtcaaggggacagagcctacttgggaaaattgaaaaaagttaattgtctttgttacaactctctcaagtgttgagaactttttattttgttttc

SEQ ID NO: 96310 - DNA, 599 bp, Chicken  19866894891655_1
  misc_feature (1)..(168): n is any nucleotide
nnnnnnnnnnnnnnnnnnnnnnnnnnnnnnnnnnnnnnnnnnnnnnnnnnnnnnnnnnnnnnnnnnnnnnnnnnnnnnnnnnnnnnnnnnnnnnnnnnnnnnnnnnnnnnnnnnnnnnnnnnnnnnnnnnnnnnnnnnnnnnnnnnnnnnnnnnnnnnnnnnnnnnnntatttgtattggtataaaaaagaagcgtttctcttagaatttgagagatgagggggaaaaaagatggaacatttcaggaacaggctgacagctggaggtacgaggtgaagtcactcatctttctccctcatytgtatggactgatgtggtattgctgtcaggctttattragtttttaatgtatgttttcagattatagtggtgactgcaaatctgtatagtgatgtagcaatgttgctaggcttttttctttttcttgtttttaccaggtatcaagcatgatgggactatgtgtgacacatgtcgacagcagccaatcattggcatccgatggaaatgtgctgaatgcacgaattacgacttgtgcacagtttgttatcatggggacaagcatcacttaaggcatcgtttttacagaattaccacaccag

SEQ ID NO: 96311 - DNA, 599 bp, Chicken  19866894891655_2
  misc_feature (1)..(130): n is any nucleotide
nnnnnnnnnnnnnnnnnnnnnnnnnnnnnnnnnnnnnnnnnnnnnnnnnnnnnnnnnnnnnnnnnnnnnnnnnnnnnnnnnnnnnnnnnnnnnnnnnnnnnnnnnnnnnnnnnnnnnnnnnnnnnnnnnntatttgtattggtataaaaaagaagcgtttctcttagaatttgagagatgagggggaaaaaagatggaacatttcaggaacaggctgacagctggaggtacgaggtgaagtcactcatctttctccctcatytgtatggactgatgtggtattgctgtcaggctttattragtttttaatgtatgttttcagattatagtggtgactgcaaatctgtatagtgatgtagcaatgttgctaggcttttttctttttcttgtttttaccaggtatcaagcatgatgggactatgtgtgacacatgtcgacagcagccaatcattggcatccgatggaaatgtgctgaatgcacgaattacgacttgtgcacagtttgttatcatggggacaagcatcacttaaggcatcgtttttacagaattaccacaccaggaagtgaaaggtaaaatataactttctttcctcccccc

SEQ ID NO: 96312 - DNA, 483 bp, Chicken  19866894891655_3
atgtcgacagcagccaatcattggcatccgatggaaatgtgctgaatgcacgaattacgacttgtgcacagtttgttatcatggggacaagcatcacttaaggcatcgtttttacagaattaccacaccaggaagtgaaaggtaaaatataactttctttcctccccccaggaaagtaaatagggagcagttaatagtggtgaacttctgtaactgcaggttaggttattgaaacttggtttaggtaaaacactgtcttaagaattggattctgttactggttctgcctctttgtgaggsacttcagatgagaccaatctttggagattggaaaacatggaagtttaggaagaatggaccagagaaagaagcttggatatgattactcagtttctttaacctcactgtatacttcctagttcttgtgttattatttaccaggtttaaaacagactgttgtctttgcacagtgtataatcacaa

SEQ ID NO: 96313 - DNA, 600 bp, Chicken  19866894891738_1
cagactttaacgaggaggaaattcagagcaaagggggtgaaattgtgaaagttaaacaggcctgtcaaataacagaaatatttgagttacatttcctaaactactttaaaagggagtaaactaaccaaatgccatctgaaattggctgtccgcccataactttggttgactttagggtcaataaagcagaggacagacataagctgaaatagctgaaaaatcaatacaaatatagataaaacacagatggagtttattatagagcagctggaaattcaaagaaagaaggctgttgctctrtactgagagtgtaactttgaaaaatattctccaagtgtgaaagttctttacaaaacaaacaactttaagaagtgaagttagacgtaccatactacagaaaacagaccatactactccgaaattcttgcacagtgtttctgatcagtgactctagaaagaaatccaaagtgggcttgctaatgatgataaaaaaaaatcattcaatgtaaatcaggaaactctaagctggttctgtccctactgctcttctcctaatatattttttcattacattctcaagtacaatttcttgtacagcac

SEQ ID NO: 96314 - DNA, 599 bp, Chicken  19866894891743_1
  misc_feature (1)..(55): n is any nucleotide
nnnnnnnnnnnnnnnnnnnnnnnnnnnnnnnnnnnnnnnnnnnnnnnnnnnnnnntggtttgcattttggacaaaagaaggaaggagtccactcctgaatgatgcaatcagctgtgctaacaggctgcaatggcacccttcagcagcacccctttaatcaaggaaagcttgctaacatggggcactgcaggtgcctcctcccatggaagcattcaaggccaggctggatggggctgtgagcaacctggtctagagggaggtgtccctgcctatagcagggaggatggaactacatgatckcaaaggtcccttccaacccaaaccattctacgatcctatgactttaaccaactcaatgaaggaatctggtctcgttcatgcaaaatgaaagcatcccaagaccattgacccaagaccattgcaacatcaagccacattagcttctgatggccacgagagatctaggatgcaataacacagagaagtacaacaccccagaagcagccctcactgcattatcttccttgccatatttcataaagaatgattttccagyttcaattgacacagcttttacacaggcattgcgatcaggtttc

SEQ ID NO: 96315 - DNA, 600 bp, Chicken  19866894891743_2
gaggtgtccctgcctatagcagggaggatggaactacatgatckcaaaggtcccttccaacccaaaccattctacgatcctatgactttaaccaactcaatgaaggaatctggtctcgttcatgcaaaatgaaagcatcccaagaccattgacccaagaccattgcaacatcaagccacattagcttctgatggccacgagagatctaggatgcaataacacagagaagtacaacaccccagaagcagccctcactgcattatcttccttgccatatttcataaagaatgattttccagyttcaattgacacagcttttacacaggcattgcgatcaggtttcaattactttaaagtgttgtgttacaaagttcaagaaaaaaacacacaccaattttaagagaaaatcagattctgaagtaaggtgtcctttccaattagtactccaactgaggccagctggccttcagagcactgttgcagatgcactcatggtcaaaccctgtgctcatcctttctcagggcagatgtacctttctgctaaagccctgtccatcagacacagccacccatgatggcaaagcaccaccttcactgagc

SEQ ID NO: 96316 - DNA, 600 bp, Chicken  19866894891782_1
gccagactacaggaatgcaaccaaggagtcactgaagcctttctctcgtgcttgtcaactcgtgcttgtcacacattgtacagcccacgtgtgcattcagaatggcaggaaaaaagtttctgactacattcactgaattaacagacctgggttgctgtggttttcttttgatattgtttatataagccactttgtgctctgtagaaatatttcctccctgtctcctccttaaggtttcctatgcatacagctcagacatgtcctatacttgagaaaataaaaattcaacagtaagaaagygtcaaatcaaaattcttagcagaaagaattagcatgtgtgttagagtgcgcgtccaacagccaggaaattacagattgttttgttactacacatgaactgcatgagtctttaacagatgatccattttcctctctttatgtccacactactaaagactgaaagaagtgaatgtctaagaaccatatctttacgttcaccagcaatgttatcccaatcccacctaagtattcttaaaatccagtataacatacacagagaaaattatatatacagatgattccagcattaattacaacttg

SEQ ID NO: 96317 - DNA, 599 bp, Chicken  19866894891866_1
  misc_feature (1)..(36): n is any nucleotide
nnnnnnnnnnnnnnnnnnnnnnnnnnnnnnnnnnnngagctctgacatcttgcttctggtgtacatctcagcagtgtcttcagctcatcacagcttttgtgaaaggtttcttgggcagtgtagcaaactttcataaacattttgtagtattttcttgtaccattccttgctttgggtgtgagaagtccctcgagatgctgtgtcgagcatatggtggtacttcttcctgctttaataaagacagaactcaggtgccagtcgctgtttctgtgtcgggtatgataaccaacgtggatgcargacccagtgagacatcacagagcggggtgtaagcagttcccttgggaattcacagcccacatccaccacttgaaatgcagcacagacgacattgcatcagcttgttccagttggaactgctcagtcttcctttgaggttcatgaaaatgagagattacctgtagaaatgatgtcaaataagatgactttggggagggtgtcaacttgaagtattttcagcagcacacctctgctcagggagctatgtaayatttctttctggggcagcctagcatccttattcctgtatttcccatgtc

SEQ ID NO: 96318 - DNA, 414 bp, Chicken  19866894891866_2
ggtgccagtcgctgtttctgtgtcgggtatgataaccaacgtggatgcargacccagtgagacatcacagagcggggtgtaagcagttcccttgggaattcacagcccacatccaccacttgaaatgcagcacagacgacattgcatcagcttgttccagttggaactgctcagtcttcctttgaggttcatgaaaatgagagattacctgtagaaatgatgtcaaataagatgactttggggagggtgtcaacttgaagtattttcagcagcacacctctgctcagggagctatgtaayatttctttctggggcagcctagcatccttattcctgtatttcccatgtctttgcgatgtgcctaaaggttctgactgttcacaacataccacaaaaaagccagatgtggtcatt

SEQ ID NO: 96319 - DNA, 528 bp, Chicken  19866894891896_1
atggacagtcatgcggtgacaccgatgcatctctttgatcataaaatcctgtctcagattctcctgctttactgcccagtgttcttccaaccttgaacacagataagatacacatccctataaacacaaggatgtattctgcgtgacccagatgaaatggatgcatgtgtgtgctcttgattacatttcagctacatcagtttcctaaacaggaatgctgcaagatagcttgtgcaccagtgccagcaggagggaggaggagactgctttctcccagtaagcaaaggatacgattcataygagtcacttatctgacataattgaaatggatgatctagaattaagtcattgtgtaaggaggtgggatcagtgaaaacaccctctttttcattgatggagtattttgtgttttttcttttcttgttttgtttgactgagtgaacaaccagcactcaggaaaaaaacaggtgcatgagataaggaggttttggactttgactctgatgtatgacatgaattcagtaaatt

SEQ ID NO: 96320 - DNA, 600 bp, Chicken  19866894891947_1
cagagataactgtaaatctagaaacaattgaagctgctggatgaggacatgatggcaatgaagacagctgtagatctcccagggactgccagactggattaaaaactggtgtgtttctctaactgctgttcaaatccacatgcccctcacttccatttccacaggtaacaatgtttgtttggtttaagttcctttcctccacattttctccatcacaatgacaaagggcattttaggcagtgcctgacaaatgaatgtgacaggtcatggcttggcaataaagtttgttacctggaggaytgggactccaaggggatgttatgctgcccttcatactgctgcaccagtgcccgaacactccagtagggggtttcaatctcctcatccatactgctgtttctggaattaacaatcacagaatgagtgatgcctcatatagtagggggcagaaattcttttggtctccaaggaggaagggaggaaagctaaaggcaggaaggagggaacagctagaaaatttcctactaaaaaagctttcccatggggagctctacttcatcatcttggtgagagggaaacaaaggcaaacagaagccaccc

SEQ ID NO: 96321 - DNA, 600 bp, Chicken  19866894892106_1
cgggcaactctatgtatatctgcatatagacacaacctgctatgaagctcccttgcaaaacgccaacaaaaaagacagtagaaaagacaggaatccttgagatttactggccctggatatagctctgagaagttgctccactgctaccgcaaggatgctggcatgaacaaattagcaactgcaaaataatcacttacgaggtctcacctacaaaataaagattccatttctcccctctctgctctttatttatttatttctttttaagcattacctttcctttggaaggggatagaaagygaaaaagaaaaaaaaaaatcagctgcagcagcaagagtgacaacatactgactttctatccagagcaatttcccttggggtggatctagcactgaactctgtagggaaatgtaattctcttctccaagtgtcagaatcttactccacgactcagaggtttggctgcaaatcatttatttatttatttattttaataatagagcatattttttacatcacaagtattgggttatgtctgtggaacagcctttttatgctttgtttttctgatgccacggatgaacatcaaacatcataatg

SEQ ID NO: 96322 - DNA, 599 bp, Chicken  19866894892124_1
  misc_feature (1)..(156): n is any nucleotide
nnnnnnnnnnnnnnnnnnnnnnnnnnnnnnnnnnnnnnnnnnnnnnnnnnnnnnnnnnnnnnnnnnnnnnnnnnnnnnnnnnnnnnnnnnnnnnnnnnnnnnnnnnnnnnnnnnnnnnnnnnnnnnnnnnnnnnnnnnnnnnnnnnnnnnnnnnnnaatagtaatgaaaccttctgcttaaatccccccatttttctaaaaccctaaaataaacttctcctgtattagccctttactgaacagaaagacaaaatgataaactataaatcattcagttactaatcataaatgagaaagagmcagaaatcataatccataaattcactctaaaagttccccctgacaccagaaattaagaggatgatgcctttccctgctggcctaagagagtgattactggtgctgtgctagtactgtaaaatatcacttaatttggaattcaccatgagactactaattgggtcaataaccagaaaggaaaagtaggcagtgacagtctgtcactcaaacatgcttttgctatctgtttagagaaattgcgtgcatccaaaaggagctgtcagagcaggatacagttgcaattatccaagaagcaagga

SEQ ID NO: 96323 - DNA, 600 bp, Chicken  19866894892200_1
agaaaggctgctgtactcatgagaaatggccataaaaacgcggttcagagcctgccctgctgctcggcgcttgtcatcttgcctatcaagctgcctaattggaaaattgggctggccttaatttagagccctgaaagttcacaccaataacttcccagagtcttttttctctttttttttaagttttattattaatggtttcagccatttacaatggctgaatggaaatctttattaaaaagaaaggaaaaaaaaaaaaaaaagcttgaatcttccattttgtctcgatccttcatttcygcgtgtgaaggtgtatcatcgggcatcacatgcatgatcatccatgcacacccccatcgctttcctgacactgttcygcctttgactgcacctggcaagctgcgtgctgctgcttacacgtgttacagacttgtctcagagctcgatgccctgcctgcttccttcctgcttggctgctctggaagcagcagccgggagaagctgctctgcagctgtaggcactcccacactgcctcttgtgttgggcactgctgataccaggtcacacgaggagacccaaggtggctcctgtgggaaagg

SEQ ID NO: 96324 - DNA, 600 bp, Chicken  19866894892200_2
cttgcctatcaagctgcctaattggaaaattgggctggccttaatttagagccctgaaagttcacaccaataacttcccagagtcttttttctctttttttttaagttttattattaatggtttcagccatttacaatggctgaatggaaatctttattaaaaagaaaggaaaaaaaaaaaaaaaagcttgaatcttccattttgtctcgatccttcatttcygcgtgtgaaggtgtatcatcgggcatcacatgcatgatcatccatgcacacccccatcgctttcctgacactgttcygcctttgactgcacctggcaagctgcgtgctgctgcttacacgtgttacagacttgtctcagagctcgatgccctgcctgcttccttcctgcttggctgctctggaagcagcagccgggagaagctgctctgcagctgtaggcactcccacactgcctcttgtgttgggcactgctgataccaggtcacacgaggagacccaaggtggctcctgtgggaaagggcgaagttctttacagagagagtggtgaggtgctggcacaggctgctcagagaggctgtggatgtcctgtccctggg

SEQ ID NO: 96325 - DNA, 600 bp, Chicken  19866894892331_1
tcactgttagcaatttttcaattgctagcaatgattttcaattgctagccctgatttcaattcttgttcttatacctcatgatggatgctagataaacgtagctttgattgtttttgagctatttctgcaaaataagcaatttagtttgtagtcttccagagttctgcccagctgcctgtattttgggactgatgtggtctcatgaagaatacttcgcaagtaaagctgattttctgaataaacttcagaaaattagaagcaaggaagctgtgaatgctaaatgtacaaatgcttctatmtattaatgcacgttgatctgattgcttagagttaacctgtgggctgttaactatgcataacgagtcrttaaacccaatgaaatcaactaaggtcaatacagatgttacatccttcttattataataagatatttcatggtgctctcttaaattggaacattttcagtaatgttttccttcatttttctattgatgaacaggaggatatttttcatagtaatactccacagtttttctcagttcacagtgcagattttctttggtagctttgctttagactgagatcttagtgtcaagaaa

SEQ ID NO: 96326 - DNA, 600 bp, Chicken  19866894892331_2
tcttatacctcatgatggatgctagataaacgtagctttgattgtttttgagctatttctgcaaaataagcaatttagtttgtagtcttccagagttctgcccagctgcctgtattttgggactgatgtggtctcatgaagaatacttcgcaagtaaagctgattttctgaataaacttcagaaaattagaagcaaggaagctgtgaatgctaaatgtacaaatgcttctatmtattaatgcacgttgatctgattgcttagagttaacctgtgggctgttaactatgcataacgagtcrttaaacccaatgaaatcaactaaggtcaatacagatgttacatccttcttattataataagatatttcatggtgctctcttaaattggaacattttcagtaatgttttccttcatttttctattgatgaacaggaggatatttttcatagtaatactccacagtttttctcagttcacagtgcagattttctttggtagctttgctttagactgagatcttagtgtcaagaaaaaggggtattttttaaaataaggatgggagaattatttagtttcatacacccagtgaaacaatgcat

SEQ ID NO: 96327 - DNA, 600 bp, Chicken  19866894892371_1
aatattccctataagacataaagtacctgaaagtttaaaacatctttctagtaacagtcaatacctgcatgtgtacgtgtcagtagtaataccttccagtaaatatacctaaaacactaacatcatctttcagatgctaataagccattctctttccttaatgattgaggaagttcatattgggactcctttctacaactctgtagatacctgacctatcccatattaggtcaggaatggacagactactttggaggtctccacagcaacatcaccaagttcaagagaggactctaaaaygactcgtgtgcctgcatcagaattcaggtaattttgacagcaggcttcctatagctgtgtgcagaaggaaggtatttgtggaaaaaggccyataacaagagaacmagatatctaggacacaagagaakggacatgtgtacacaggtgctttccagaaccaatttgaagagtgaagaatcaaaaaactccaggacttaccctttttgaagaaaggcttcccagatttctgaattaacattagatcacaaaagcaaattacagtagctaagtggaactttttcaagtttaaaattaatagaa

SEQ ID NO: 96328 - DNA, 600 bp, Chicken  19866894892371_2
ccttccagtaaatatacctaaaacactaacatcatctttcagatgctaataagccattctctttccttaatgattgaggaagttcatattgggactcctttctacaactctgtagatacctgacctatcccatattaggtcaggaatggacagactactttggaggtctccacagcaacatcaccaagttcaagagaggactctaaaaygactcgtgtgcctgcatcagaattcaggtaattttgacagcaggcttcctatagctgtgtgcagaaggaaggtatttgtggaaaaaggccyataacaagagaacmagatatctaggacacaagagaakggacatgtgtacacaggtgctttccagaaccaatttgaagagtgaagaatcaaaaaactccaggacttaccctttttgaagaaaggcttcccagatttctgaattaacattagatcacaaaagcaaattacagtagctaagtggaactttttcaagtttaaaattaatagaaacattgttttgactgctaacacaaaggagagagaagcatgactcctgggaagagtggccattaccttagcaggggggctagtgctatttgg

SEQ ID NO: 96329 - DNA, 600 bp, Chicken  19866894892371_3
tacctaaaacactaacatcatctttcagatgctaataagccattctctttccttaatgattgaggaagttcatattgggactcctttctacaactctgtagatacctgacctatcccatattaggtcaggaatggacagactactttggaggtctccacagcaacatcaccaagttcaagagaggactctaaaaygactcgtgtgcctgcatcagaattcaggtaattttgacagcaggcttcctatagctgtgtgcagaaggaaggtatttgtggaaaaaggccyataacaagagaacmagatatctaggacacaagagaakggacatgtgtacacaggtgctttccagaaccaatttgaagagtgaagaatcaaaaaactccaggacttaccctttttgaagaaaggcttcccagatttctgaattaacattagatcacaaaagcaaattacagtagctaagtggaactttttcaagtttaaaattaatagaaacattgttttgactgctaacacaaaggagagagaagcatgactcctgggaagagtggccattaccttagcaggggggctagtgctatttggttttgaagccttkt

SEQ ID NO: 96330 - DNA, 600 bp, Chicken  19866894892371_4
ttcagatgctaataagccattctctttccttaatgattgaggaagttcatattgggactcctttctacaactctgtagatacctgacctatcccatattaggtcaggaatggacagactactttggaggtctccacagcaacatcaccaagttcaagagaggactctaaaaygactcgtgtgcctgcatcagaattcaggtaattttgacagcaggcttcctatagctgtgtgcagaaggaaggtatttgtggaaaaaggccyataacaagagaacmagatatctaggacacaagagaakggacatgtgtacacaggtgctttccagaaccaatttgaagagtgaagaatcaaaaaactccaggacttaccctttttgaagaaaggcttcccagatttctgaattaacattagatcacaaaagcaaattacagtagctaagtggaactttttcaagtttaaaattaatagaaacattgttttgactgctaacacaaaggagagagaagcatgactcctgggaagagtggccattaccttagcaggggggctagtgctatttggttttgaagccttktaaggcactaaagtgctttccaaa

SEQ ID NO: 96331 - DNA, 469 bp, Chicken  19866894892371_5
magatatctaggacacaagagaakggacatgtgtacacaggtgctttccagaaccaatttgaagagtgaagaatcaaaaaactccaggacttaccctttttgaagaaaggcttcccagatttctgaattaacattagatcacaaaagcaaattacagtagctaagtggaactttttcaagtttaaaattaatagaaacattgttttgactgctaacacaaaggagagagaagcatgactcctgggaagagtggccattaccttagcaggggggctagtgctatttggttttgaagccttktaaggcactaaagtgctttccaaataatgaaggtcctttatgtctcccagtttctggtataatttaatagaaagctgtaccaagattgtaacaaaattattttgaggagaatatacttttctcaaaactgagaagcaatgaaatggattcagttagaaaaaaaaaattg

SEQ ID NO: 96332 - DNA, 527 bp, Chicken  19866894892448_1
ctagctctatgacagagaataatatctagtttgctatgatgtcactgggactgcaaagttgtatgccaccaaggaagaattcatagctttatgtgcagtttttttatagctgaacccacattgttttctgctctcccttgtgagaaggaatatatttctttttaggcacatgagaggatctccaggttcttctgtaaccaatgaaggaaggaagaatctgtaattccatgtcttctgttatcgtgtagacatttctgtatttcttttctggctggcaccgcttttcttagctactactcrgttcagagaaggcttttttgtaagactgctacatcagtgaagcctggtttgcctgtctactttctgtaacgagcacatctttccctctatctatggaaattgatacttctgaaatggaactactagaatatttacaaaattgaagtgcctgccacagggatttcttgctattttctcaccatcccatcatgctgagctatgaaatatgtctttatgtgtttgttcag

SEQ ID NO: 96333 - DNA, 600 bp, Chicken  19866894892572_1
cggcatgggaaaggtgagtgcaaacacactgtatctccctgttggcatcattcagaactgcggtttcttgtcacagatacctgctcaaacacgacctcagcttggtctctggcagccgggtgccactaatagcaggtagacaaacaggcatatttacttgatgtttacctttctccttacctctgtcacacacgctaatgccgcagatccaggctccccgattagttctgctgactgcggtaaccctgtagccttcattaaagaaaagcattctaagggaactgtatccattccattttstgtcctcagccctttgtggaagccggactgaaagcagctcggtggtaaatctacctctcccagaggtaaaatgcaaagagcacagaatgatgctcgccagcaaagagaggaagcaattaaaggacagagagagaacagaagacggagtgttgcctttaagaagggatgctggggataaatattgaaattcttcattttcaaagaggtgcctttgtattgttttctccttcaaggaaagcaacagcgctactcccagaagccatggcatgaattagactgttagcattgggcaatcagaaa

SEQ ID NO: 96334 - DNA, 600 bp, Chicken  19866894892591_1
cgccctccaataatgaactgtagtgtcactctgagcaattgcttaagattctttcaccaggatgtcagcctgtttctccccagaggtggaagcactggatctgtgcacagaggtcatctcagatagagcttccattgttaagaaaagcactccctttgttattcaccttcgtggaggcgtctgtaaccttaattctcttgtagtaaaataatgtgttttttttttttccctaacttgtcttcctgtcttatctaatgttggagcagcatcaacaaaagcagtgtggtttatctgataatrcgtagggctggcatttgagacctacagattcccacactggatttgtcacaggcttggtaggtgctgtgacagcataataataaattgaactttttttacctgttgtcttgggaaagggaaatgctacagacagcagtgtgttttctaaagcttgtctttggccatcgattgtatgtgttgcagggtgttaagctgttagcttttgtcataaatgataatggaaaacagcttcccttgctcgtgcagccctcgaggtcgaatatagctttgtttacaaaattgaattattttgtgaccaac

SEQ ID NO: 96335 - DNA, 600 bp, Chicken  19866894910208_1
catcataaacaaccccttgttgtatgggcagtgaggcagactggaaatcagctgaggttatgtgatctgtggttcaaagtcaaattggagaccagtaggtcttagtgtacccacagaggtcaatagcaggttcagagcattgttaattatgtatatacctaaggacttttactggacactgatacttagttacaagccactcacaattattctctctaaagtgtggcctgccacctgaatctctttcactctatggagtacttcaacttgagagtcagctaagtgctcacctgaataagrgatggtcttagtttccagtacagtgatattcaaatttatcagctactacttcaatagtcaatgtcaaaaaagcttgccaaaacagaactatcaagattctgggatgtttctggcaagcctggtagctgcaaaagctgggcatgggcgacagtcagatctttcccattactgtaaagctcctcacaataaaccattttgtattaaagtttaagattggaaaaatattcatgctagttgtatgaagagctcagagtacaaagaaatacattattgtctcattgagaataccacagttaagtg

SEQ ID NO: 96336 - DNA, 600 bp, Chicken  19866894910295_1
ccagtgggacaagctgaggaaactagttttttccatatctgttgtttgtgctcaatttctttgagatacatctaaagcatatttacatttgccaacagtgagaagcagaaatgaagcttcaagctgtattttatcccttacaaacttgatctgtgtgaaagccacagttccttcctgaatgtctgcttgccagatggaaatttatctttaaaatctgtacagtagtgtgatattactgacatgttatttctatgcagcgttgtctgtgcagtggtgttctctcaaaaaaagaataatcartccatttaaactcaagatataattgctcattaatatcccattgatactgcgagagcctttaatcatgcttaaatgtaaaacaactcatactgaagtttgttttttctcttacttagtaaagcaaatacaaaacatagcaagccactgggctgatgcagttcacttacaaagacactattcacacactttcgttttcaaacgtttgtcgaagattattcgtttagaagaattaatttaactatttcattttagttacatctaagacttaggtggattactggatcatcgcaaaaatacttc

SEQ ID NO: 96337 - DNA, 599 bp, Chicken  19866894910374_1
  misc_feature (1)..(204): n is any nucleotide
nnnnnnnnnnnnnnnnnnnnnnnnnnnnnnnnnnnnnnnnnnnnnnnnnnnnnnnnnnnnnnnnnnnnnnnnnnnnnnnnnnnnnnnnnnnnnnnnnnnnnnnnnnnnnnnnnnnnnnnnnnnnnnnnnnnnnnnnnnnnnnnnnnnnnnnnnnnnnnnnnnnnnnnnnnnnnnnnnnnnnnnnnnnnnnnnnnnnnnnnnnnnatcttgatcttttagttcttcggcaggcacaattttctccgtggaagttttgcatagctagggactgtttcttgagcctttttatgtactaactaygaaaacatacatattgttagcttgctgtgctcttaaacaaatgggtgaatkaggttcatggagctttggaagacaaattacactaccaaggttgccagcaattccgcataaacagctggtggtttagttgattagtggtgaagaaaaaattagatccgtgcytgactcctatacaaggaatgggataygctgtgaaatctattctttaaatatgagagcgtgtgttgatttttctatttcaattacatcttaaactgcatcacattatgaactacatggagattaggcaaatacgttgg

SEQ ID NO: 96338 - DNA, 599 bp, Chicken  19866894910374_2
  misc_feature (1)..(153): n is any nucleotide
nnnnnnnnnnnnnnnnnnnnnnnnnnnnnnnnnnnnnnnnnnnnnnnnnnnnnnnnnnnnnnnnnnnnnnnnnnnnnnnnnnnnnnnnnnnnnnnnnnnnnnnnnnnnnnnnnnnnnnnnnnnnnnnnnnnnnnnnnnnnnnnnnnnnnnnnnatcttgatcttttagttcttcggcaggcacaattttctccgtggaagttttgcatagctagggactgtttcttgagcctttttatgtactaactaygaaaacatacatattgttagcttgctgtgctcttaaacaaatgggtgaatkaggttcatggagctttggaagacaaattacactaccaaggttgccagcaattccgcataaacagctggtggtttagttgattagtggtgaagaaaaaattagatccgtgcytgactcctatacaaggaatgggataygctgtgaaatctattctttaaatatgagagcgtgtgttgatttttctatttcaattacatcttaaactgcatcacattatgaactacatggagattaggcaaatacgttggataaatgtagtactgaacgctgagactagcatcagtttatgttgaagcaat

SEQ ID NO: 96339 - DNA, 599 bp, Chicken  19866894910374_3
  misc_feature (1)..(42): n is any nucleotide
nnnnnnnnnnnnnnnnnnnnnnnnnnnnnnnnnnnnnnnnnnatcttgatcttttagttcttcggcaggcacaattttctccgtggaagttttgcatagctagggactgtttcttgagcctttttatgtactaactaygaaaacatacatattgttagcttgctgtgctcttaaacaaatgggtgaatkaggttcatggagctttggaagacaaattacactaccaaggttgccagcaattccgcataaacagctggtggtttagttgattagtggtgaagaaaaaattagatccgtgcytgactcctatacaaggaatgggataygctgtgaaatctattctttaaatatgagagcgtgtgttgatttttctatttcaattacatcttaaactgcatcacattatgaactacatggagattaggcaaatacgttggataaatgtagtactgaacgctgagactagcatcagtttatgttgaagcaatgatgaggacaaataaatacttttcttggaagacttcactgaagtcgcttggagtgagatggagttcttggcctgaatattcattcctatgtagtttcagttgtgatgtatt

SEQ ID NO: 96340 - DNA, 599 bp, Chicken  19866894910374_4
  misc_feature (1)..(16): n is any nucleotide
nnnnnnnnnnnnnnnnatcttgatcttttagttcttcggcaggcacaattttctccgtggaagttttgcatagctagggactgtttcttgagcctttttatgtactaactaygaaaacatacatattgttagcttgctgtgctcttaaacaaatgggtgaatkaggttcatggagctttggaagacaaattacactaccaaggttgccagcaattccgcataaacagctggtggtttagttgattagtggtgaagaaaaaattagatccgtgcytgactcctatacaaggaatgggataygctgtgaaatctattctttaaatatgagagcgtgtgttgatttttctatttcaattacatcttaaactgcatcacattatgaactacatggagattaggcaaatacgttggataaatgtagtactgaacgctgagactagcatcagtttatgttgaagcaatgatgaggacaaataaatacttttcttggaagacttcactgaagtcgcttggagtgagatggagttcttggcctgaatattcattcctatgtagtttcagttgtgatgtattttgcctccatcatgctaatttctgcc

SEQ ID NO: 96341 - DNA, 599 bp, Chicken  19866894910482_1
  misc_feature (1)..(33): n is any nucleotide
nnnnnnnnnnnnnnnnnnnnnnnnnnnnnnnnnccctcgaacacacctatagcccttacagccccctcatagaaccatggagctcctcccaaagccccctacacacccatatcacccctataccacaacagacccctagagaaacaaatctccctacatctcccatatagccctaaaaatcaccctaaagacgtcacagcactttagagccccatatccaccaatagctcccacagatccctagatcccaaccatagccccctctttccacatataccccaatacccctactacagtccmccacagctttccagagccccatagcccccctagagacacaattaacctccttaaagccccacacacccatagagccacccctagatccagcctgatagccccccctcatatcctcctacaacttccacacagccctatatccctctgcagcccccctatagcccccaataatcttacatccctcccgatagctcccacagaccactacagccccatatcccccagtatccacccctataacccactatagccccctgtcgccccaaagcactaccctataccccatacagtcccctttc

SEQ ID NO: 96342 - DNA, 600 bp, Chicken  19866894910578_1
ggacatctatcatggtaacacacaacctttgattaagaaatgagaattcagatgggcaacacattaaaggggcttaaaattgcttttctgttagtcttaatatggaaagtgggaatcattatctaacgggatcccataggaattgttggcccatgctctgtttctcatttcttttaaggagctgaaaaatactgatggcaaatttatatagaaggcatagagttttggagtttggaaataaaagtaccttatgaaagaatccataagccatacgctttagtaaaacaaacaaaaaaaaamccacatatatgaacaaataatttggcttagttttgtaggatgagcaatactctatctggagaaacagtgccaaaaaagtatctaggagatcacagtagataattggttgaatgtaagatttccctgtcatatagtggccaggggcctaaaggtataaaatgagaaacttcaaacaggaatcatgaagttatgtttctctggtgtcagtagtgttgaatatctgagcacgtgcaaagtgccacatctccacagttcttgagcacctccaggggatggtgactccaccagctccatgggcag

SEQ ID NO: 96343 - DNA, 599 bp, Chicken  19866894910618_1
  misc_feature (1)..(224): n is any nucleotide
nnnnnnnnnnnnnnnnnnnnnnnnnnnnnnnnnnnnnnnnnnnnnnnnnnnnnnnnnnnnnnnnnnnnnnnnnnnnnnnnnnnnnnnnnnnnnnnnnnnnnnnnnnnnnnnnnnnnnnnnnnnnnnnnnnnnnnnnnnnnnnnnnnnnnnnnnnnnnnnnnnnnnnnnnnnnnnnnnnnnnnnnnnnnnnnnnnnnnnnnnnnnnnnnnnnnnnnnnnnnnnnnacctttgtaaacagttggccaaaaacaaaggaaaaataatcagaagagacatctcaggcaatgttttcagacattwtatgttcagacagtttcactgacttcagtcttctttacctttaaggcaagtcttcctgggattgccacagtacccagaaatatccctcttttgtgggaggctgctctagactttcccagtttttactatgtcattggtctgatgaatcttctccactgcacttggacttctatgttaagggtctgggctttcctgaaagttatctttacctcaaatacaagttactcatctgaagctgttgatctatgcagtatttgtgaattcatttataacagagacatcagctcctagagtctttt

SEQ ID NO: 96344 - DNA, 600 bp, Chicken  19866894910890_1
gatgcagtaaatgacttccccttctgcctgttggggcttagccttaaatgggttgattaatatgaagtcaaatgcagcagaattgtccctccctttgccgtaaagcctcaccttgtgtctcaccagtgttaaagaaggaggttgtagctgactgtaggggcttctccatattggtctccccatactttttggttctcccacagacaaatgaattcgagaacagaaatcatccgtgtatgtctttatggaacatatgacctaaagctcttcgatttaaaggatacggcccctgtgcgtccrtaatctcacctcactcacaatttaaagtgtgcctcattgcacactcatctcatgtgttagtgctgcaatcatgttgccaagatctaakccattccgcaaatgtcctgggaaaaagccctccagacagtgaggtagcagctgtgtaagagatgatggcataccagaaaatgcattcacttagcatttctgtgcaatgatttaggtagacctggatactgaagagtggtattgtgacaacctatcaatccagcacatctccatcccagtttgaagccgaaaccttttaccattaaagaacag

SEQ ID NO: 96345 - DNA, 600 bp, Chicken  19866894910890_2
ctccctttgccgtaaagcctcaccttgtgtctcaccagtgttaaagaaggaggttgtagctgactgtaggggcttctccatattggtctccccatactttttggttctcccacagacaaatgaattcgagaacagaaatcatccgtgtatgtctttatggaacatatgacctaaagctcttcgatttaaaggatacggcccctgtgcgtccrtaatctcacctcactcacaatttaaagtgtgcctcattgcacactcatctcatgtgttagtgctgcaatcatgttgccaagatctaakccattccgcaaatgtcctgggaaaaagccctccagacagtgaggtagcagctgtgtaagagatgatggcataccagaaaatgcattcacttagcatttctgtgcaatgatttaggtagacctggatactgaagagtggtattgtgacaacctatcaatccagcacatctccatcccagtttgaagccgaaaccttttaccattaaagaacagaaatattagatagttaggcattaggcctacatgagtatctgctatttataaataaggcgtttgtcaacattttgcccacaatacgtag

SEQ ID NO: 96346 - DNA, 599 bp, Chicken  19866894910941_1
  misc_feature (1)..(175): n is any nucleotide
nnnnnnnnnnnnnnnnnnnnnnnnnnnnnnnnnnnnnnnnnnnnnnnnnnnnnnnnnnnnnnnnnnnnnnnnnnnnnnnnnnnnnnnnnnnnnnnnnnnnnnnnnnnnnnnnnnnnnnnnnnnnnnnnnnnnnnnnnnnnnnnnnnnnnnnnnnnnnnnnnnnnnnnnnnnnnnncgacattttttggttattactacagtgcatattatgctagtaacatacagtgtatgtctgaggtgtgggtcaaaggtactacagggaccattcatggtccacaagcagacatagaaatatattamtaatgtctaactttaaacaattagcaaaacaaaggaataaaaaaacctgaaaatgcttctgaaatgcttgtcattccctcaagaagagaaaagaaactaatacgatcaaatgtgtttttgtattgccaaacacttaaagagaacagttcaaaagcaaattaccacagaactctgtagtccaaatcattcatttaataatatgattattttttccaaaagtcacaaacaagaaaaaatacatagaatataagaagaatatgtttatctatgggatttattgtgtacaaaaagttcatctg

SEQ ID NO: 96347 - DNA, 531 bp, Chicken  19866894910941_2
gaaatgcttgtcattccctcaagaagagaaaagaaactaatacgatcaaatgtgtttttgtattgccaaacacttaaagagaacagttcaaaagcaaattaccacagaactctgtagtccaaatcattcatttaataatatgattattttttccaaaagtcacaaacaagaaaaaatacatagaatataagaagaatatgtttatctatgggatttattgtgtacaaaaagttcatctgttttcatttatttaactattttaatatgtatgactgttggacagagctgttcgtaaacttyagttcaccttccaaaagatataaatacattgaacacaaacagtactgaagaaatatgcatttacctctggagggcatgactatttcagtaaaactcacaaaatagtgaaccataatattataaaagctaatatatttattttcatacaaaattcacttttcccatgaaattcagcagacacaaaataaaatatgaccctaagatttaaaatttgtcaaaataaaagaagcc

SEQ ID NO: 96348 - DNA, 599 bp, Chicken  19866894911124_1
  misc_feature (1)..(79): n is any nucleotide
nnnnnnnnnnnnnnnnnnnnnnnnnnnnnnnnnnnnnnnnnnnnnnnnnnnnnnnnnnnnnnnnnnnnnnnnnnnnnnncagaaaagggctcttttttcctgaggaaaaaaaaaaggcactttgtgcctatgagatgctgtttgcactgtcacggccaggcagcaatgggctcaagtagaaggaaagctccgaagtgccgaaccccagaacagccatcacctgcaccacagcacagccacacagcaccacgaagcagaacatccaccagcggggtcacaaagccctccgtcccacagcasagcccacagaccagcactccacgggaacctaaagccagcgagggcttacaaataaaccaccrctctggggcagcgctgtaatccagaggatggatggaacagaagcagcactcagccgaattgctttgcaagaaaaacaacagcaacaacaaaaaaaaacaaccctaaaattaaagagaactgcaaatccctgacatttgccttcagtcgatgctgcctattcctagcaggcagtgtggggaggggaaccacagctccgtgctgcactgaaggataaaccggcgctccctaatccaatt

SEQ ID NO: 96349 - DNA, 599 bp, Chicken  19866894911124_2
  misc_feature (1)..(17): n is any nucleotide
nnnnnnnnnnnnnnnnncagaaaagggctcttttttcctgaggaaaaaaaaaaggcactttgtgcctatgagatgctgtttgcactgtcacggccaggcagcaatgggctcaagtagaaggaaagctccgaagtgccgaaccccagaacagccatcacctgcaccacagcacagccacacagcaccacgaagcagaacatccaccagcggggtcacaaagccctccgtcccacagcasagcccacagaccagcactccacgggaacctaaagccagcgagggcttacaaataaaccaccrctctggggcagcgctgtaatccagaggatggatggaacagaagcagcactcagccgaattgctttgcaagaaaaacaacagcaacaacaaaaaaaaacaaccctaaaattaaagagaactgcaaatccctgacatttgccttcagtcgatgctgcctattcctagcaggcagtgtggggaggggaaccacagctccgtgctgcactgaaggataaaccggcgctccctaatccaatttacgccccgacacgtgcagcacaagaagggctcgagaacaaagcagtggcagctcacagggt

SEQ ID NO: 96350 - DNA, 600 bp, Chicken  19866894911124_3
acggccaggcagcaatgggctcaagtagaaggaaagctccgaagtgccgaaccccagaacagccatcacctgcaccacagcacagccacacagcaccacgaagcagaacatccaccagcggggtcacaaagccctccgtcccacagcasagcccacagaccagcactccacgggaacctaaagccagcgagggcttacaaataaaccaccrctctggggcagcgctgtaatccagaggatggatggaacagaagcagcactcagccgaattgctttgcaagaaaaacaacagcaacaacraaaaaaaacaaccctaaaattaaagagaactgcaaatccctgacatttgccttcagtcgatgctgcctattcctagcaggcagtgtggggaggggaaccacagctccgtgctgcactgaaggataaaccggcgctccctaatccaatttacgccccgacacgtgcagcacaagaagggctcgagaacaaagcagtggcagctcacagggtgcaggagcactctggagggagcggtgctaaatgataactcagggggttatggaatacattagcaggaactgcagagagagcacatttgca

SEQ ID NO: 96351 - DNA, 600 bp, Chicken  19866894911141_1
cccagtgacaccgtcgtgcccgagggtgctttgagggacgatcctttggggttggccctctgcgcagcaatgcatttatgctgcgaaacaaagagccattagtgctttagtatttgtttataacatccgcgtcgctgcgtttgtgcaccgaagggctgaagaattggtggtggctttggagaagctggcggactttctttgtacccagggcagtgttctgggtgtcagagagctgcacgtcctgctaaggcagagagccatggaatatcccgagttggaagggacccataaggaccattkggtccaactcctgcaggatctgtccccagctgtcccactgcacttctttgcctgagmgagggctgctggtgcttcctgatggaacgctggattcttgattccaaaaggaatgggtatccacaaaccctttcagcttcttttcagacaactgaaagcgagctgttcttgggcaaagctgagcttttgtggggtttggctgaaaaatgtctgtttccaatgcttcatttccaaaaataattcagtttttggctattaggaagcagaaagataagatttttttaatctatggcaatccctctt

SEQ ID NO: 96352 - DNA, 600 bp, Chicken  19866894911141_2
ctctgcgcagcaatgcatttatgctgcgaaacaaagagccattagtgctttagtatttgtttataacatccgcgtcgctgcgtttgtgcaccgaagggctgaagaattggtggtggctttggagaagctggcggactttctttgtacccagggcagtgttctgggtgtcagagagctgcacgtcctgctaaggcagagagccatggaatatcccgagttggaagggacccataaggaccattkggtccaactcctgcaggatctgtccccagctgtcccactgcacttctttgcctgagmgagggctgctggtgcttcctgatggaacgctggattcttgattccaaaaggaatgggtatccacaaaccctttcagcttcttttcagacaactgaaagcgagctgttcttgggcaaagctgagcttttgtggggtttggctgaaaaatgtctgtttccaatgcttcatttccaaaaataattcagtttttggctattaggaagcagaaagataagatttttttaatctatggcaatccctctttttgctgttgaaattcttcatgtgaaaaagatacctgctggatcccatccgaacact

SEQ ID NO: 96353 - DNA, 524 bp, Chicken  19866894911196_1
aggcattaattactgagttctacatgtgaaatcttcatcttccacctttattgtggaaaacagaggagttaacatgtaaagtaagcacgggaggcattcagcaggcctttgagcatggaagaggcggagctgaggccctcgggtagcgcaccctgctgttgtgctccctggggcagccacggtctccgtacgtctggaaacgcgtgcttaataattttaatgacttgctacatgatgcttcaaatgtgattcgtagttaatttatgtggcccaatgcagagtactaactgcagtcttcarttttccattggagtgaggctgagtagttgggttgagtcttaaatgaaatgttctcagccagttcattcccagttcactgtaggaaacctgagatgccatcaaaattatatttcttattgggaagccacagactatttttggtcagatttaattttgatgttactgaagaatttgacctatgcattatagaaaattctaatattggatcattggatggattgtgg

SEQ ID NO: 96354 - DNA, 600 bp, Chicken  19866894911456_1
tattgggataattgctacagcaggcgaggggtgagcgaggagggggaaggccggtgagcagcagcaaacaaggggcccttgtgcataggcggccccggcacgaggccccggctccagccggcagtgagagccaaacaaacggggactgtttgagccgagcgaggacaagcgggcggcaggacagaaagcagagctctgctgagagcgagccggagccaagggcctggctgggagctgggtgctgagtgggcccaacgcttcccatgggtacagtggccctgctccagcccagctctttastggggacagggtggtggtgtccccacgccgtccccagggtggggaccggtggggcagtggcaaagttctaagaggcaccgggttggcacagaggtgacagccattcctttcccactgaggctgtccccagtacattggaattccccatcatggaaaaaataacaggaacaaggcccaaccccccccccccccccaagaaaaaaaaacccacatccccagttgtagtcaatgtgacatctccatgtggctgtggcacagctgaaccacgaggtcacggcgttgctgtgcacagctgctcac

SEQ ID NO: 96355 - DNA, 599 bp, Chicken  19866894911485_1
  misc_feature (1)..(28): n is any nucleotide
nnnnnnnnnnnnnnnnnnnnnnnnnnnntctgcacagcttcctaactcaaatggcactcagctgccagcctaggaccacaacaaggcagtcacagcaccatggttaaggctgagcgcagtctcctctgccaactgggctgctggctttgagtgagacctccacaggcagacaagttgcaacacccactcagaaagacagggagatgtggattagtgcagaagaaagcaagggtgttctgaaagcacagggtaagagcatcctttgctgggaattcacacactttttgtccagtacagagmagccaacaactctccctgaacaggagatatttaagctgcaggcacagagctccatgctactggtgctccatgaagtcrtggaaagggacaccacagcagcctgtctgaggcatttctgcccctggggaagaaccaatggtgtggcagtgatgctctaagttggggctggcacccacaatgccwggtgagaaaggacagagaggctcagctccccaacctgcagctttctgttctgctgactcccacagcccaggagcagaccaggctctcacggcctggttgttctcagcagcccacag

SEQ ID NO: 96356 - DNA, 600 bp, Chicken  19866894911485_2
caacaaggcagtcacagcaccatggttaaggctgagcgcagtctcctctgccaactgggctgctggctttgagtgagacctccacaggcagacaagttgcaacacccactcagaaagacagggagatgtggattagtgcagaagaaagcaagggtgttctgaaagcacagggtaagagcatcctttgctgggaattcacacactttttgtccagtacagagmagccaacaactctccctgaacaggagatatttaagctgcaggcacagagctccatgctactggtgctccatgaagtcrtggaaagggacaccacagcagcctgtctgaggcatttctgcccctggggaagaaccaatggtgtggcagtgatgctctaagttggggctggcacccacaatgccwggtgagaaaggacagagaggctcagctccccaacctgcagctttctgttctgctgactcccacagcccaggagcagaccaggctctcacggcctggttgttctcagcagcccacagccagcaggatgctgcagacagcaacttaatgtcatttctggaggatgcagcaacaaacccagcagtggctgaagtcact

SEQ ID NO: 96357 - DNA, 600 bp, Chicken  19866894911485_3
ccactcagaaagacagggagatgtggattagtgcagaagaaagcaagggtgttctgaaagcacagggtaagagcatcctttgctgggaattcacacactttttgtccagtacagagmagccaacaactctccctgaacaggagatatttaagctgcaggcacagagctccatgctactggtgctccatgaagtcrtggaaagggacaccacagcagcctgtctgaggcatttctgcccctggggaagaaccaatggtgtggcagtgatgctctaagttggggctggcacccacaatgccwggtgagaaaggacagagaggctcagctccccaacctgcagctttctgttctgctgactcccacagcccaggagcagaccaggctctcacggcctggttgttctcagcagcccacagccagcaggatgctgcagacagcaacttaatgtcatttctggaggatgcagcaacaaacccagcagtggctgaagtcactgcttagtggatgctgccactcactgtgtgctttcatcttcgaagcatgttaccagtgctacaccttcatggcgttttgttcatctttcagttattcacaggtaat

SEQ ID NO: 96358 - DNA, 599 bp, Chicken  19866894911532_1
  misc_feature (1)..(98): n is any nucleotide
nnnnnnnnnnnnnnnnnnnnnnnnnnnnnnnnnnnnnnnnnnnnnnnnnnnnnnnnnnnnnnnnnnnnnnnnnnnnnnnnnnnnnnnnnnnnnnnnnnagcctggcctagaggtgctgctctttagtagaaacagctgcagacccagtgtcccctggtcaggtgggaggctctttgaagcaacatgttgcctctttaaaaggaaattgagcatgtgagaacttaaacctgtaaaactcatcaagggctctgccattgtttatctctgttgtaactttatatagaattaaagcaaaatgcrttacttcgcttccaagaaaagatggttcagctcccccttggtcttggagacgcaggaaatgaccacataaccacaaatactttctagtggaatgaagatgagtgacaaactgtccacaggaatagattcttaaccagatgggctaagaagtgaaatgtagctcaaccgtctggtttgaagttaaaaaccaatgtttaaaccaaccaagaaaagagcaaatgttacataagcagtggctacatgagagggcagatctgagctcctcttactgataggggtgttggggtcagccacagctt

SEQ ID NO: 96359 - DNA, 600 bp, Chicken  19866894911607_1
attcactgatgtgcattaaattcctgaatgcaaaaggttggttcgaattctagtgtcttaaatgtctgacacacagtgtgaaactaatagctgtcaatgccttgtcaaggtgacctctcatttggaactgacgtagcctttgttttatgcagtttaatgcacttaaattaattgcatttaaagtgtggaatgaagtttgatacagggattaaggcatctttgcaattagagtgcagttgtcttattttatcgaggtcattcccttctcttggtgctgttttttgttctactggtgttgcyttgccctcctggggatctcttctggcacacctatttctcctggtttggtattgctgtgttttgtgtgtgctacagaaataggagcaacaasagatacaagatatttcatttttcaactaagaaaaatggggatttcttctaaaaagttctctcttatcagtttttttccaaccctacttcatcaactattatgtcggttgtccaaggtgtggtacctgtagtgaagtcatgcagtcttctgaataaagggttttgcagtgtcacctagtggctaaatacaagwacagatgaatatcccag

SEQ ID NO: 96360 - DNA, 600 bp, Chicken  19866894911607_2
tgtcaatgccttgtcaaggtgacctctcatttggaactgacgtagcctttgttttatgcagtttaatgcacttaaattaattgcatttaaagtgtggaatgaagtttgatacagggattaaggcatctttgcaattagagtgcagttgtcttattttatcgaggtcattcccttctcttggtgctgttttttgttctactggtgttgcyttgccctcctggggatctcttctggcacacctatttctcctggtttggtattgctgtgttttgtgtgtgctacagaaataggagcaacaasagatacaagatatttcatttttcaactaagaaaaatggggatttcttctaaaaagttctctcttatcagtttttttccaaccctacttcatcaactattatgtcggttgtccaaggtgtggtacctgtagtgaagtcatgcagtcttctgaataaagggttttgcagtgtcacctagtggctaaatacaagwacagatgaatatcccagtgatgcttttcgagttwtgagtccttatgaggaaacaagtggataaggacagaaacaaacaaaaagcaagcaaccaacgaaacatcccaaa

SEQ ID NO: 96361 - DNA, 600 bp, Chicken  19866894911607_3
gttctactggtgttgcyttgccctcctggggatctcttctggcacacctatttctcctggtttggtattgctgtgttttgtgtgtgctacagaaataggagcaacaasagatacaagatatttcatttttcaactaagaaaaatggggatttcttctaaaaagttctctcttatcagtttttttccaaccctacttcatcaactattatgtcggttgtccaaggtgtggtacctgtagtgaagtcatgcagtcttctgaataaagggttttgcagtgtcacctagtggctaaatacaagwacagatgaatatcccagtgatgcttttcgagttwtgagtccttatgaggaaacaagtggataaggacagaaacaaacaaaaagcaagcaaccaacgaaacatcccaaacctaagtcacagagaagcaccaatgaaatgaaaacttcaggagaaagctgagaaggaaatagaggtgagattgggaatgaactaagagttctctctgagatcagtgagtgtccagaagttcagaaaaaaaaaattaaaatacaaaaacttagggcttaccatcaaccattcagcatggatattggcagaaat

SEQ ID NO: 96362 - DNA, 577 bp, Chicken  19866894911607_4
tcttctggcacacctatttctcctggtttggtattgctgtgttttgtgtgtgctacagaaataggagcaacaasagatacaagatatttcatttttcaactaagaaaaatggggatttcttctaaaaagttctctcttatcagtttttttccaaccctacttcatcaactattatgtcggttgtccaaggtgtggtacctgtagtgaagtcatgcagtcttctgaataaagggttttgcagtgtcacctagtggctaaatacaagwacagatgaatatcccagtgatgcttttcgagttwtgagtccttatgaggaaacaagtggataaggacagaaacaaacaaaaagcaagcaaccaacgaaacatcccaaacctaagtcacagagaagcaccaatgaaatgaaaacttcaggagaaagctgagaaggaaatagaggtgagattgggaatgaactaagagttctctctgagatcagtgagtgtccagaagttcagaaaaaaaaaattaaaatacaaaaacttagggcttaccatcaaccattcagcatggatattggcagaaatttattctctga

SEQ ID NO: 96363 - DNA, 600 bp, Chicken  19866894911748_1
tgtccctgatggacttagagccatggctgtggtggctgatggggctgcaagagcaggagcgtgcaaagtgagctgctaggggagtagtacccagctgttgttgcaagaggtggaactgagggatgccaatttgctcagctgatgctaaaatagcaacagggcagtgcatgacttacggtcctaaacagaaggaaatttttggtgataatttacctggaaagacttaacaatggctttttccagaagagtcatactgataaagagtattgcggaacaaactctgcttttatctcatatttmaaatgtttgcagaaggtgagcatggctgagccgtggctgctgtcagcccacagcaggtcctagggcacttgttctcctcatggagctgcagggacaaccagggtagggaagagcagagcagggagggtggttctggtgacggagggaggaaagagagaattggatacctgctaaggaatttattgaaagataacttacaatttctgtggagtggacatctggaaagcaaatcttctccaaacagcattcctacagtttccaggcaagttcccagctgccgtgaccacgcggtatacccac

SEQ ID NO: 96364 - DNA, 598 bp, Chicken  19866894911842_1
agcaggaaatagatttacatgacagtggagcattgggaaagaataggatgtttaagcacttatgttagctgtagccaggagcactggaaacctgaatgtagagtacagcttgctcattccacagttgtggtctttctgttgtgcgtcagggattctcaaagtctgtgtagttttcacttagaaatatgctttacttaagtgcatttttaagaagctcttccgaatgtgtatggaaatctctgtgctggagttttcttagcaaaacttcagagcttttgtctggctatccgcaaactcacrcagtcctttttgtgtgatttaagtcacttgtgttaccgtagagatgccaaactcttgctaaattctcagtagcgagagaatgcaatcaatttgtgccttttttagcttgatctttttaagctgtgctagcaaaaagattgcaagcttcccaaaagctagggaggagacttccagtgctgctggcgtttaacttcatgaacttaagactgattctaggcggtagtcagttgctctgccatcattaggagaatgctaccaaacaaacaggtgtggaggacatgcaagaacttcagaagct

SEQ ID NO: 96365 - DNA, 600 bp, Chicken  19866894912010_1
aagacttcacagactgtagcttttcttaacatgatcctttttaactatgggtttcacatggggaaacaaagtctgagttaatttgtgtcgttttccatgagacactcttgtacacgggatgctgtgagaatacgtcagtcatcaagacagatacggaatatacaaggctcagcaagtctgacacagtgctgcactatacattcttgccaaaataaatttgtcataaaatgctagttaggacttgacagactcatgtagttctctggtttcacagtaagcatatgatccagccagcacccrtggtgcttgggcaaaccaagactcagccagctctgagtccttgcaaatggatcaggctgtgtttgtttgcttcatatccagagcagcggtgtgctgtggggaactgtacaggactcctagcaatagtctgtctgcatgagtgaaaggtaagaatgatttaatttatctaaatgaaatctgcttttctgaatgtaagtaatcagaaaagatcctcttgattcatgcgggcttgggtgtatagcataaaaactcttcctagctaccaaccacagtgagttaggtgtcatgctaataattctt

SEQ ID NO: 96366 - DNA, 599 bp, Chicken  19866894912022_1
  misc_feature (1)..(187): n is any nucleotide
nnnnnnnnnnnnnnnnnnnnnnnnnnnnnnnnnnnnnnnnnnnnnnnnnnnnnnnnnnnnnnnnnnnnnnnnnnnnnnnnnnnnnnnnnnnnnnnnnnnnnnnnnnnnnnnnnnnnnnnnnnnnnnnnnnnnnnnnnnnnnnnnnnnnnnnnnnnnnnnnnnnnnnnnnnnnnnnnnnnnnnnnnnnctcttatgagcaatttgtttaatgctgaatgcatgcaggtggagggacagaagcaagaaaaaatgtgagttagaaatgcagaaatgcttatacaagaataatggaatccaacraaagataaagtggaaaggacagacagatgcagatttacttggttatgtaaaaggctgtagcattctcattagtaatcttggcctttggcacatgagaagtaacagtggtcactgcacatggtcctaatgcctggaytttcatccctacctgttccacccatctccctgcctacttcagaggttgatctacttgsattcagataggcataygtcctccctgtactgcccaggycttgcagaaggaaccaaggaccttggggatatgggtgtcccttctctcagcttaaatctggtgctag

SEQ ID NO: 96367 - DNA, 599 bp, Chicken  19866894912022_2
  misc_feature (1)..(51): n is any nucleotide
nnnnnnnnnnnnnnnnnnnnnnnnnnnnnnnnnnnnnnnnnnnnnnnnnnnctcttatgagcaatttgtttaatgctgaatgcatgcaggtggagggacagaagcaagaaaaaatgtgagttagaaatgcagaaatgcttatacaagaataatggaatccaacraaagataaagtggaaaggacagacagatgcagatttacttggttatgtaaaaggctgtagcattctcattagtaatcttggcctttggcacatgagaagtaacagtggtcactgcacatggtcctaatgcctggaytttcatccctacctgttccacccatctccctgcctacttcagaggttgatctacttgsattcagataggcataygtcctccctgtactgcccaggycttgcagaaggaaccaaggaccttggggatatgggtgtcccttctctcagcttaaatctggtgctagtctgcattggtcttgagtcctggagctgagcatgctcagtacagacagtccctggggaactgagatgtgaaaatcctgtgaatttcttcctgaaggcatgtgatctgaaatttctccaaaggcttctgtaacttga

SEQ ID NO: 96368 - DNA, 600 bp, Chicken  19866894912022_3
gagcaatttgtttaatgctgaatgcatgcaggtggagggacagaagcaagaaaaaatgtgagttagaaatgcagaaatgcttatacaagaataatggaatccaacraaagataaagtggaaaggacagacagatgcagatttacttggttatgtaaaaggctgtagcattctcattagtaatcttggcctttggcacatgagaagtaacagtggtcactgcacatggtcctaatgcctggaytttcatccctacctgttccacccatctccctgcctacttcagaggttgatctacttgsattcagataggcataygtcctccctgtactgcccaggycttgcagaaggaaccaaggaccttggggatatgggtgtcccttctctcagcttaaatctggtgctagtctgcattggtcttgagtcctggagctgagcatgctcagtacagacagtccctggggaactgagatgtgaaaatcctgtgaatttcttcctgaaggcatgtgatctgaaatttctccaaaggcttctgtaacttgaccaaatttgggcagattgttccaaaaacagcaraactccrttctctgactgaaagccat

SEQ ID NO: 96369 - DNA, 600 bp, Chicken  19866894912022_4
gctgaatgcatgcaggtggagggacagaagcaagaaaaaatgtgagttagaaatgcagaaatgcttatacaagaataatggaatccaacraaagataaagtggaaaggacagacagatgcagatttacttggttatgtaaaaggctgtagcattctcattagtaatcttggcctttggcacatgagaagtaacagtggtcactgcacatggtcctaatgcctggaytttcatccctacctgttccacccatctccctgcctacttcagaggttgatctacttgsattcagataggcataygtcctccctgtactgcccaggycttgcagaaggaaccaaggaccttggggatatgggtgtcccttctctcagcttaaatctggtgctagtctgcattggtcttgagtcctggagctgagcatgctcagtacagacagtccctggggaactgagatgtgaaaatcctgtgaatttcttcctgaaggcatgtgatctgaaatttctccaaaggcttctgtaacttgaccaaatttgggcagattgttccaaaaacagcaraactccrttctctgactgaaagccatctccctggtagatgtg

SEQ ID NO: 96370 - DNA, 600 bp, Chicken  19866894912022_5
gacagaagcaagaaaaaatgtgagttagaaatgcagaaatgcttatacaagaataatggaatccaacraaagataaagtggaaaggacagacagatgcagatttacttggttatgtaaaaggctgtagcattctcattagtaatcttggcctttggcacatgagaagtaacagtggtcactgcacatggtcctaatgcctggaytttcatccctacctgttccacccatctccctgcctacttcagaggttgatctacttgsattcagataggcataygtcctccctgtactgcccaggycttgcagaaggaaccaaggaccttggggatatgggtgtcccttctctcagcttaaatctggtgctagtctgcattggtcttgagtcctggagctgagcatgctcagtacagacagtccctggggaactgagatgtgaaaatcctgtgaatttcttcctgaaggcatgtgatctgaaatttctccaaaggcttctgtaacttgaccaaatttgggcagattgttccaaaaacagcaraactccrttctctgactgaaagccatctccctggtagatgtgaagccctgctgcagcatgttgg

SEQ ID NO: 96371 - DNA, 480 bp, Chicken  19866894912022_6
cctacttcagaggttgatctacttgsattcagataggcataygtcctccctgtactgcccaggycttgcagaaggaaccaaggaccttggggatatgggtgtcccttctctcagcttaaatctggtgctagtctgcattggtcttgagtcctggagctgagcatgctcagtacagacagtccctggggaactgagatgtgaaaatcctgtgaatttcttcctgaaggcatgtgatctgaaatttctccaaaggcttctgtaacttgaccaaatttgggcagattgttccaaaaacagcaraactccrttctctgactgaaagccatctccctggtagatgtgaagccctgctgcagcatgttggggcactgcagcttttccaaaataagtcgtctgccaaaactgtaggctaaacagcgttcattcctcaaactcatccttgggaaatgggttctgctggagtttcctctttgctcctaa

SEQ ID NO: 96372 - DNA, 473 bp, Chicken  19866894912022_7
cagaggttgatctacttgsattcagataggcataygtcctccctgtactgcccaggycttgcagaaggaaccaaggaccttggggatatgggtgtcccttctctcagcttaaatctggtgctagtctgcattggtcttgagtcctggagctgagcatgctcagtacagacagtccctggggaactgagatgtgaaaatcctgtgaatttcttcctgaaggcatgtgatctgaaatttctccaaaggcttctgtaacttgaccaaatttgggcagattgttccaaaaacagcaraactccrttctctgactgaaagccatctccctggtagatgtgaagccctgctgcagcatgttggggcactgcagcttttccaaaataagtcgtctgccaaaactgtaggctaaacagcgttcattcctcaaactcatccttgggaaatgggttctgctggagtttcctctttgctcctaa

SEQ ID NO: 96373 - DNA, 600 bp, Chicken  19866894912242_1
agtaataaaaaaggcattataggtcttgtttttactgttggacattaaaactgtttcatgtaattaataacaggaaatcagaaatggagtttaggaaagaattagattcatgctgtatgaaggcaaggaaaataaagattgatgttaatgagaaattactttatttctttgtagaacactggtcaatgctagtaggtactgtactgtgctttaactgtgctgtaagcatacctggaaagaaataggtgttagtgtacatcaagtagtcctgacactttaccagggcttctatgtagttcrttctgctgaggaggacatgacatgaaacagtttccagcgcttacacaaacatcatraagttagacaggagcaaatcgatagtgaattgtatttctattgcttcatttgtcttttcattccacacacagaatccctcaagttctttttggcaagtgatacatatatatawatawaaataaagttgaaaacattttgtttctatgtgctgtgttggcaacaataaaaagaaacgctgcagtaaagtggaatggtgcaatacctgggtaccaacataaaaggtattcgatatgaaaattatga

SEQ ID NO: 96374 - DNA, 600 bp, Chicken  19866894912242_2
catgtaattaataacaggaaatcagaaatggagtttaggaaagaattagattcatgctgtatgaaggcaaggaaaataaagattgatgttaatgagaaattactttatttctttgtagaacactggtcaatgctagtaggtactgtactgtgctttaactgtgctgtaagcatacctggaaagaaataggtgttagtgtacatcaagtagtcctgacactttaccagggcttctatgtagttcrttctgctgaggaggacatgacatgaaacagtttccagcgcttacacaaacatcatraagttagacaggagcaaatcgatagtgaattgtatttctattgcttcatttgtcttttcattccacacacagaatccctcaagttctttttggcaagtgatacatatatatawatawaaataaagttgaaaacattttgtttctatgtgctgtgttggcaacaataaaaagaaacgctgcagtaaagtggaatggtgcaatacctgggtaccaacataaaaggtattcgatatgaaaattatgagcaattctattgtgctgcagatcacaatgtatctgagcattttatycaggtcacat

SEQ ID NO: 96375 - DNA, 600 bp, Chicken  19866894912242_3
tgtagaacactggtcaatgctagtaggtactgtactgtgctttaactgtgctgtaagcatacctggaaagaaataggtgttagtgtacatcaagtagtcctgacactttaccagggcttctatgtagttcrttctgctgaggaggacatgacatgaaacagtttccagcgcttacacaaacatcatraagttagacaggagcaaatcgatagtgaattgtatttctattgcttcatttgtcttttcattccacacacagaatccctcaagttctttttggcaagtgatacatatatatawatawaaataaagttgaaaacattttgtttctatgtgctgtgttggcaacaataaaaagaaacgctgcagtaaagtggaatggtgcaatacctgggtaccaacataaaaggtattcgatatgaaaattatgagcaattctattgtgctgcagatcacaatgtatctgagcattttatycaggtcacataacaaaacttactgaatgttggtgaaattacaccaacataaaattcacttaaaactaaacaaaccttcctcaccacatacattgcagagaaatgaatttgtgagaggaagatt

SEQ ID NO: 96376 - DNA, 600 bp, Chicken  19866894912242_4
gaacactggtcaatgctagtaggtactgtactgtgctttaactgtgctgtaagcatacctggaaagaaataggtgttagtgtacatcaagtagtcctgacactttaccagggcttctatgtagttcrttctgctgaggaggacatgacatgaaacagtttccagcgcttacacaaacatcatraagttagacaggagcaaatcgatagtgaattgtatttctattgcttcatttgtcttttcattccacacacagaatccctcaagttctttttggcaagtgatacatatatatawatawaaataaagttgaaaacattttgtttctatgtgctgtgttggcaacaataaaaagaaacgctgcagtaaagtggaatggtgcaatacctgggtaccaacataaaaggtattcgatatgaaaattatgagcaattctattgtgctgcagatcacaatgtatctgagcattttatycaggtcacataacaaaacttactgaatgttggtgaaattacaccaacataaaattcacttaaaactaaacaaaccttcctcaccacatacattgcagagaaatgaatttgtgagaggaagatttctt

SEQ ID NO: 96377 - DNA, 595 bp, Chicken  19866894912242_5
aaacatcatraagttagacaggagcaaatcgatagtgaattgtatttctattgcttcatttgtcttttcattccacacacagaatccctcaagttctttttggcaagtgatacatatatatawatawaaataaagttgaaaacattttgtttctatgtgctgtgttggcaacaataaaaagaaacgctgcagtaaagtggaatggtgcaatacctgggtaccaacataaaaggtattcgatatgaaaattatgagcaattctattgtgctgcagatcacaatgtatctgagcattttatycaggtcacataacaaaacttactgaatgttggtgaaattacaccaacataaaattcacttaaaactaaacaaaccttcctcaccacatacattgcagagaaatgaatttgtgagaggaagatttcttccaatgagtaatgtgccttgtatgatttattcctgggggacatcatttttctccatcatgaagggacactgtgatgaccagattagacttggaaaactaactctgaaacaaagttagataagatatatcaaatgcttcttgtacagggacaaatgtcattattgcaat

SEQ ID NO: 96378 - DNA, 600 bp, Chicken  19866894912767_1
tttaacattcagtttgcatgttagtgctaagttagtatcaaaaaagttacagtcgtgctttgacaaagttcattcacaacaataatactggtgtctactgtctgaacataaaattagttggaatgatgttctgtagccacataatagtttgtcttaccttcatacttgtaaaacttcctgtctaccacaactgaaatgctagagaaaggaagaacaagattccacaggcacaagtgctggagacactgcctggagactcgtctgtggatgagaaagagctttacgcttgcaggagagctmttgcaaaaagaatttattcttcctgctccctgaaaacagtaatgaatattgttgatttagcataagctcaagtaatctgctttcctgtttctgtgtacattattgtgaaaataaattagcacctcagtggtagtccaggactgtctttcacatcgagtgcacctgcttgtattgcaagcatcctaaggctttcaactgacttctgactttcacatttttatcaaggagcgcaacttagacaaatatcacaagtgttttcctttcagttaatacattaaaggaatatcatttttccaaagg

SEQ ID NO: 96379 - DNA, 600 bp, Chicken  19866894912792_1
aatggtgacgtaaattttacagacttaaattctaactaaatccatgacatttaaaataagttgtattacctcatcatgactgaagttacagggactgacagaaaacttaagcaacaatttatggtcacaatcactctacaatgatcagtcagataaatttacatttcagtttttaacacttttcaaaatctgagcagtaaatgacaagggggaaacacactactgaaattttgaactgagctctttctttgtacatgaattttcagctgaattttcttcttaagtagctgccaccgtctsagagttttctccaagctagtttcatgtgcctgaaaggctgttgagtttcactttcttcttcagatggatccttttctatacactcattaactgaggtgctgctgcagagctgcaactggcctttgaaagctgccgttatgtcagtgttgtttgtttcgctgtttgtggcaggagaaaaayaggtttggggttgttttgtttgtttgttagcattgtctatgcaatctggcattaattacctctctttaatgactagatttcagccaatcagaagttagaatctggcaggttttggacatt

SEQ ID NO: 96380 - DNA, 600 bp, Chicken  19866894912792_2
tttcaaaatctgagcagtaaatgacaagggggaaacacactactgaaattttgaactgagctctttctttgtacatgaattttcagctgaattttcttcttaagtagctgccaccgtctsagagttttctccaagctagtttcatgtgcctgaaaggctgttgagtttcactttcttcttcagatggatccttttctatacactcattaactgaggtgctgctgcagagctgcaactggcctttgaaagctgccgttatgtcagtgttgtttgtttcgctgtttgtggcaggagaaaaayaggtttggggttgttttgtttgtttgttagcattgtctatgcaatctggcattaattacctctctttaatgactagatttcagccaatcagaagttagaatctggcaggttttggacattagcagctcattaattcgtatcaactcaggaaggtactgcatgggatggttagtccattttgttagagaagtaccaaaagaaggagggagggctgaacaaatggtttatttttctttatcttttccttttttctttttccttttttccttttccttttttcctcttccttttttccttttc

SEQ ID NO: 96381 - DNA, 600 bp, Chicken  19866894912797_1
aatagaggtgtttttttttttttgtcttttttctttgaacaactttttatttcgtggttcagtagattaaaagagcttaagattagacctggctacttagagtttactgtaaaaactggccaggggatgaatgcacttcaccattatgccataatgcaaagcaacagtccaaattactcagaggcagatgccagcttgaacagaccaacccaaaccttgtataagcaagcttttctcatgttggctaaaaacaatacttgagctaaaccagagacagcctgcaccaagttaacaagtgcwgtttagctttaactgaaccactatgaaaacaatactgaaaatatgaagatctaaatgatttaggtgcctaatcctctgagcttagatagaccctgggcaaccttcaaactccaagccttgaaggatatttatataatttatttcacctgagagaagtctcctggtgaaggttttatttcataaaacatgcatcaccaattatcagtttcagcgtgcttctaaatggatcctacaactgctaattctgcttctacaaccgtgtacataaacttgtaatttttcaaataaatctgcaacctg

SEQ ID NO: 96382 - DNA, 600 bp, Chicken  19866894912808_1
ctggattcttagtcacagaggttcaggtctgaaatttgttcaaaacctgttattaataccgctcttcacagtgcttcctgaggcggcggaggctgggagaggtttatttactgagctcgctgccgactagctaatcaagtttcaagaagcataagctggaacccttccaacttccctttgttaattaaccccaagtgaaatttttagagctacttaacaggaaatttggaaaaggtcaggttctgggagagcctctttaataaaagatgaggtagcagagtggatacaaggccttcagaytgaatgcaaggagataagtttaaaatagtttctacatctttgttgctgcttgacattgcaacatcrgagtcacagcaaaaccctcaatccttgagtagttttccagtcattaatttgaagctgtgtacttcctctagcacagccgcagcatccacatagcacacaaacarttttaggacacgtggcaaacaaatccaacagacagcggcccaaaccgaaccaacacctgccctggactgctctcctctgccctccatccctcccagccgtagccctgctgctcctcccctccctgaagct

SEQ ID NO: 96383 - DNA, 593 bp, Chicken  19866894912808_2
cacagtgcttcctgaggcggcggaggctgggagaggtttatttactgagctcgctgccgactagctaatcaagtttcaagaagcataagctggaacccttccaacttccctttgttaattaaccccaagtgaaatttttagagctacttaacaggaaatttggaaaaggtcaggttctgggagagcctctttaataaaagatgaggtagcagagtggatacaaggccttcagaytgaatgcaaggagataagtttaaaatagtttctacatctttgttgctgcttgacattgcaacatcrgagtcacagcaaaaccctcaatccttgagtagttttccagtcattaatttgaagctgtgtacttcctctagcacagccgcagcatccacatagcacacaaacarttttaggacacgtggcaaacaaatccaacagacagcggcccaaaccgaaccaacacctgccctggactgctctcctctgccctccatccctcccagccgtagccctgctgctcctcccctccctgaagctgatagctgctcgtgctgagcactgcaccgagccgtgcagccgatcccctccagagaagg

SEQ ID NO: 96384 - DNA, 489 bp, Chicken  19866894912808_3
cttccctttgttaattaaccccaagtgaaatttttagagctacttaacaggaaatttggaaaaggtcaggttctgggagagcctctttaataaaagatgaggtagcagagtggatacaaggccttcagaytgaatgcaaggagataagtttaaaatagtttctacatctttgttgctgcttgacattgcaacatcrgagtcacagcaaaaccctcaatccttgagtagttttccagtcattaatttgaagctgtgtacttcctctagcacagccgcagcatccacatagcacacaaacarttttaggacacgtggcaaacaaatccaacagacagcggcccaaaccgaaccaacacctgccctggactgctctcctctgccctccatccctcccagccgtagccctgctgctcctcccctccctgaagctgatagctgctcgtgctgagcactgcaccgagccgtgcagccgatcccctccagagaagg

SEQ ID NO: 96385 - DNA, 600 bp, Chicken  19866894912837_1
cgaggaagatcgaagaatcataaaatgatttgggttggaagggacctttaagatcatctagttccaaccctctgctagaggcagggacagctccccactagaccaggttgctcaaagccccatccagcctggccttgaacacctctagggtggggacatccacaacctctctatacaacctgttccattgtctcaccaccctcacagtaaacaatttcttccttgttaggttattattcttccttattagtctaaagctaccctcttccagtttaaatccatttctccctgtcctgtcaytacatgcccttctaaaaagtccctcctcagctttgctataggcccccttcaggtactgggaggccactgtaaggttaccctggagccttctcttcttcaggttcaagagccccagctctctcagcctgtcctcgtagggccctctgaatgtcttcatggccttcctctgcacccsctccagcagttcaatgtccttcttgtgtttcaggctccaagtactccaggtgggtctcatgagagcagagtagagggacagaatcacctcccctgacctgctggtcatgcttctcttgatacaac

SEQ ID NO: 96386 - DNA, 600 bp, Chicken  19866894912837_2
caacctgttccattgtctcaccaccctcacagtaaacaatttcttccttgttaggttattattcttccttattagtctaaagctaccctcttccagtttaaatccatttctccctgtcctgtcaytacatgcccttctaaaaagtccctcctcagctttgctataggcccccttcaggtactgggaggccactgtaaggttaccctggagccttctcttcttcaggttcaagagccccagctctctcagcctgtcctcgtagggccctctgaatgtcttcatggccttcctctgcacccsctccagcagttcaatgtccttcttgtgtttcaggctccaagtactccaggtgggtctcatgagagcagagtagagggacagaatcacctcccctgacctgctggtcatgcttctcttgatacaacccaggatacagttggccttctgggctgcaagagcatgtttctggcttatgttgattctttcatcaattgacaatccccaatccttcttctcagggctgctctcaaaccattctctgcccaacctatatatatatatgtatgcttgggattgccctgacccacgtgcaggaccttg

SEQ ID NO: 96387 - DNA, 599 bp, Chicken  19866894912841_1
  misc_feature (1)..(138): n is any nucleotide
nnnnnnnnnnnnnnnnnnnnnnnnnnnnnnnnnnnnnnnnnnnnnnnnnnnnnnnnnnnnnnnnnnnnnnnnnnnnnnnnnnnnnnnnnnnnnnnnnnnnnnnnnnnnnnnnnnnnnnnnnnnnnnnnnnnnnnnnnntacttcctaaacacacacacacacacacacacaaaaaaaaaacaacaacaaaacaactgttcctctgtgcctcatgatcacattaagacttgtaaacataaatcacaagtaagtagtttatgatggcttcagagagcgcagagtgcatgctgttataatatraacagctacattagtggagacaagaggtaaggtcagcactggagacactgaggtgaaggtaaagctgagaaggtacagcagtaaagggaacatacagagaaagatcctatttttttatcctattttcctaaacatttactccaaacaatgttttggagagtagtcccagaaccttaaccaccattcttaatatctatataggactataaaaagggggaaaggaagaattaaaaaaataaataaataaagtaagcacagtttcattctgttggaaaggcttcctcacgcctgcattaaca

SEQ ID NO: 96388 - DNA, 600 bp, Chicken  19866894913099_1
aagaaaataaataaataccagttactgtgaaaggaataagtgtacaccagaagctaaaatacagctgataaaacttagcccacatttcacagacaatgagatgtagtaaagatagcagatgtgaggaaagcttaattgaaaaagtttaccattttttctgattaaacttcagtttgttcccattcttcctgttgacaacattaatttttccattttctaacctgactccatccaatctgcaaatcattaacatcagtaataaatagtacaatcagtaaagagttcaaatcactaagaaaragtttcaagaagtaatagcacttctgtccattcaccctataaaactgaaaaataattccatctgtcatggaaaactacagaaggccagctgcaaaatatacttgaaatttattctacawttttggtatctttttattttaatgaaagctgtactgaaggctgaagtccaacgtaacaggaccaaaaatctagaagttacagagtytactgccagtagaatctgtcagttatctgagcaaagacagtgctgtggaagagatacacgtttcagcacaggctttttaacattctaagttatga

SEQ ID NO: 96389 - DNA, 600 bp, Chicken  19866894913099_2
tgtgaggaaagcttaattgaaaaagtttaccattttttctgattaaacttcagtttgttcccattcttcctgttgacaacattaatttttccattttctaacctgactccatccaatctgcaaatcattaacatcagtaataaatagtacaatcagtaaagagttcaaatcactaagaaaragtttcaagaagtaatagcacttctgtccattcaccctataaaactgaaaaataattccatctgtcatggaaaactacagaaggccagctgcaaaatatacttgaaatttattctacawttttggtatctttttattttaatgaaagctgtactgaaggctgaagtccaacgtaacaggaccaaaaatctagaagttacagagtytactgccagtagaatctgtcagttatctgagcaaagacagtgctgtggaagagatacacgtttcagcacaggctttttaacattctaagttatgaaggcttatgaattagaatagtaaagatacaggagcactgctcgtagattatgaggcaatgtacttccaacagggaagagcttcatcatggcaattttacttggaaagtttatttttagc

SEQ ID NO: 96390 - DNA, 543 bp, Chicken  19866894913099_3
ttttccattttctaacctgactccatccaatctgcaaatcattaacatcagtaataaatagtacaatcagtaaagagttcaaatcactaagaaaragtttcaagaagtaatagcacttctgtccattcaccctataaaactgaaaaataattccatctgtcatggaaaactacagaaggccagctgcaaaatatacttgaaatttattctacawttttggtatctttttattttaatgaaagctgtactgaaggctgaagtccaacgtaacaggaccaaaaatctagaagttacagagtytactgccagtagaatctgtcagttatctgagcaaagacagtgctgtggaagagatacacgtttcagcacaggctttttaacattctaagttatgaaggcttatgaattagaatagtaaagatacaggagcactgctcgtagattatgaggcaatgtacttccaacagggaagagcttcatcatggcaattttacttggaaagtttatttttagcagtagattcacatattttctgattaattt

SEQ ID NO: 96391 - DNA, 600 bp, Chicken  19866894913103_1
ggatataagaataaagcacagccctcctaaaaggacttgaggtactggtggatggcaagctggacatgaaccagcaatgtgcccctgcagcccagaaagctaactgtattgtgggctgcatcagaagaagtgtggccagcagggtgagggaggtgaacctgcacctctgctctgtgctgtgagacctcacctggagtactgcatccaatgtggagtcctcaatacagcagagacatggagctgttggtttgttggtttgtttggtctctctaaaggagagctaaataaatgatccaaggratggaatgaggacaggctgagagagctggggctgtccatcctggagaagggaaggctccagggagatatgagagtggcctttcagtatctaaaaggcagctgtaagagagaagggaacagaccctttagcagggtctgttgtgacaggaaatgggggaatggtttccagctaaacaaggggaaatttagattggttatgtggaaaaagtcttttatgataagggtggtgaagtaccagaactagttgctcagagatgtggccgataccctattgctggagacattcaagattaggctgga

SEQ ID NO: 96392 - DNA, 570 bp, Chicken  19866894913316_1
tcaaggatggagactgcacaatttttggcaacttgttccaatgtctggccaccctcaaggtaaaaaaaaaaaagaattcttacatttaagaggattttcctaaatttcagttggcccacattgtccttttgctggataccactgagaaaagactgacttcaccttctctgcttgcctccatcaggtatttgttaaacacactgataagatacccctgagccttctattctacagtcccatttctctgcttcttcacatatgcaccaatccatgctccagatcgtgatctttgtgaacctrttctggatgtagtctggtaagcccatggcaccacctcagtatgacagttgtcmkttttgttatgaggacacattactggctcatagtgagcttgtgtccaccagaacccccaggtcctgctctgccgagctactttccaactggcagttatttggtactggtgtatgaggttattcctcctcactgcaagatttttcatttccctttgttgaacttcatgaatctcatgtcagcaaagtatattatgctttaataatattcaacttaagt

SEQ ID NO: 96393 - DNA, 517 bp, Chicken  19866894913316_2
ctcaaggtaaaaaaaaaaaagaattcttacatttaagaggattttcctaaatttcagttggcccacattgtccttttgctggataccactgagaaaagactgacttcaccttctctgcttgcctccatcaggtatttgttaaacacactgataagatacccctgagccttctattctacagtcccatttctctgcttcttcacatatgcaccaatccatgctccagatcgtgatctttgtgaacctrttctggatgtagtctggtaagcccatggcaccacctcagtatgacagttgtcmkttttgttatgaggacacattactggctcatagtgagcttgtgtccaccagaacccccaggtcctgctctgccgagctactttccaactggcagttatttggtactggtgtatgaggttattcctcctcactgcaagatttttcatttccctttgttgaacttcatgaatctcatgtcagcaaagtatattatgctttaataatattcaacttaagt

SEQ ID NO: 96394 - DNA, 516 bp, Chicken  19866894913316_3
tcaaggtaaaaaaaaaaaagaattcttacatttaagaggattttcctaaatttcagttggcccacattgtccttttgctggataccactgagaaaagactgacttcaccttctctgcttgcctccatcaggtatttgttaaacacactgataagatacccctgagccttctattctacagtcccatttctctgcttcttcacatatgcaccaatccatgctccagatcgtgatctttgtgaacctrttctggatgtagtctggtaagcccatggcaccacctcagtatgacagttgtcmkttttgttatgaggacacattactggctcatagtgagcttgtgtccaccagaacccccaggtcctgctctgccgagctactttccaactggcagttatttggtactggtgtatgaggttattcctcctcactgcaagatttttcatttccctttgttgaacttcatgaatctcatgtcagcaaagtatattatgctttaataatattcaacttaagt

SEQ ID NO: 96395 - DNA, 600 bp, Chicken  19866894913372_1
agtgcttgccttcctaaatttggtaaacataaactagtcggtagctgccaatacttcctgtcttttaagtcgcagcaaaactttttaaccaggttatactgagaagcgtctttctaacatagcccaggccagggagggcacgatcagtccattttcatttgacttcgagtgatgtcttttccctgtgtttgctttcaatactttaagtaaaatgacaaaaacatgagaattctaataataccttattgttttattagcattggtgtggggaagaaagttccaagaaggcaggaaaaggakttttttttaaatgtcaggtaagtcaaccacrgccagctttgtttcagaagcaacaactatgtactacctttagttgtaatagcattcatctacaaatcagagtaaagcttcacatttgattttccacaactgttcttggcacatattaaatctctatttcatacagttgtacaatctgccactgacaagtgtcttgctcacagtcgccaattaccaggctgagaattcaaatttaaattagttcatcatagacgtacatggaacttgattttatttacagcactactgtctccacttacc

SEQ ID NO: 96396 - DNA, 600 bp, Chicken  19866894913372_2
aactagtcggtagctgccaatacttcctgtcttttaagtcgcagcaaaactttttaaccaggttatactgagaagcgtctttctaacatagcccaggccagggagggcacgatcagtccattttcatttgacttcgagtgatgtcttttccctgtgtttgctttcaatactttaagtaaaatgacaaaaacatgagaattctaataataccttattgttttattagcattggtgtggggaagaaagttccaagaaggcaggaaaaggatttttttttaaatgtcaggtaagtcaaccacrgccagctttgtttcagaagcaacaactatgtactacctttagttgtaatagcattcatctacaaatcagagtaaagcttcacatttgattttccacaactgttcttggcacatattaaatctctatttcatacagttgtacaatctgccactgacaagtgtcttgctcacagtcgccaattaccaggctgagaattcaaatttaaattagttcatcatagacgtacatggaacttgattttatttacagcactactgtctccacttacctggctccaaagctgtacatcatttgagctga

SEQ ID NO: 96397 - DNA, 428 bp, Chicken  19866894913424_1
agatatggtattccttaaaatttcaagaaactggaacatttcccatcaaactctaattgtattatgattaacagaagtttggattcagatacaaaccataaatacaactttaatatcagagattgtcagcttaagaagttatactcttattacattaggcaacagtcagttaaataacatttactaagcaatgttagttcctaatgtgagaagcagaaaataaagccagaagattttatttctatattcaagcaaatatagctgatgttctgagacataactgaatgcaagtactgaccrgttaattattaaggtgtttactgtatagttttagatactttgatcaaatgttagagaactacagtgacagataaatgtccacttggaaacaacaacaaaaaagccatgctgctcacattttataggaa

SEQ ID NO: 96398 - DNA, 600 bp, Chicken  19866894913512_1
aatccaccagccaatccctgccttgaaggctgggatatgcagaaagtgcaagagaggggaatatgtttaataaggggggggctccattttgcagtctttattactaatgttgctgatgctcaggcatgagctgcagaagaacaaagctttaggaagatttgcacgaggaattacactgtgaaggagaaggtagcctgaggaacagagaaacatgcagctgcattcatagacaaatagaggcaataagcaagaggtgttaggcagtgtaggtgaaggcttagggcagtatcattattgcarttcctttcctaccgaaatgagggatgtgaagcttgatatgtcagatggaactaaatcacgtgtatttgctttctgagacagccccagttctgcacactgattgcgttgtggctttttcttctcaytgatgataaaaatttgtactttctctaacttycagtgatgggagtttctgaggacagagttgtttagtgcaggaaggcaaaatggaatttagatattaagttgatgcttccctctgtaatggcaaagagggctcaagccacagggcagaaatatcaatggagcagtggtttcacc

SEQ ID NO: 96399 - DNA, 589 bp, Chicken  19866894913512_2
atgagctgcagaagaacaaagctttaggaagatttgcacgaggaattacactgtgaaggagaaggtagcctgaggaacagagaaacatgcagctgcattcatagacaaatagaggcaataagcaagaggtgttaggcagtgtaggtgaaggcttagggcagtatcattattgcarttcctttcctaccgaaatgagggatgtgaagcttgatatgtcagatggaactaaatcacgtgtatttgctttctgagacagccccagttctgcacactgattgcgttgtggctttttcttctcaytgatgataaaaatttgtactttctctaacttycagtgatgggagtttctgaggacagagttgtttagtgcaggaaggcaaaatggaatttagatattaagttgatgcttccctctgtaatggcaaagagggctcaagccacagggcagaaatatcaatggagcagtggtttcaccgttcccttggcaaggctgaggactgaaagtcaaacttgaattttaggtttggagtcaaaatattgcagaagcatgtactctgaaattgtgcacagcttcatccaccttgcgtaa

SEQ ID NO: 96400 - DNA, 557 bp, Chicken  19866894913512_3
tttgcacgaggaattacactgtgaaggagaaggtagcctgaggaacagagaaacatgcagctgcattcatagacaaatagaggcaataagcaagaggtgttaggcagtgtaggtgaaggcttagggcagtatcattattgcarttcctttcctaccgaaatgagggatgtgaagcttgatatgtcagatggaactaaatcacgtgtatttgctttctgagacagccccagttctgcacactgattgcgttgtggctttttcttctcaytgatgataaaaatttgtactttctctaacttycagtgatgggagtttctgaggacagagttgtttagtgcaggaaggcaaaatggaatttagatattaagttgatgcttccctctgtaatggcaaagagggctcaagccacagggcagaaatatcaatggagcagtggtttcaccgttcccttggcaaggctgaggactgaaagtcaaacttgaattttaggtttggagtcaaaatattgcagaagcatgtactctgaaattgtgcacagcttcatccaccttgcgtaa

SEQ ID NO: 96401 - DNA, 600 bp, Chicken  19866894913701_1
ccattacttaaccaggacattcaaggatgcattcaaggccaggctggatatggctctgggcagcctgggctgctggttgacaaccctgcacatagcaggggggttgaaactagatgatctttgaggtgcttttcaacccaggccattctatgattctgtgacattacacactgaaggaacatgaagtgacctgcacaattattatttcgagtccacacctaggcaattgcaccacgctgcaagtgtttcatacacaagacagctgaagatcacagaatcattaaggctggaaaagacctstaggatcaccaagaccaacgcatcccaccatgcccactgagcatggccctcagagccaaatctccatggttctggaacacctccagggacggtgactccaccactccctgggcagctgtgccaacacattgccactcctggcgagaagaaacgtttcctaatatccaacctgaagataactgccaacaacaaaagacattagaaagttgcaactcctcctattctcagcctacacagctgttaaagcaaaacaggaccacttagggccacagttttctagattttgtttttgaagacttt

SEQ ID NO: 96402 - DNA, 599 bp, Chicken  19866894913703_1
  misc_feature (1)..(2): n is any nucleotide
nncctctgtggatggagctgagaaaagggaggtaccacagcttgtgaccaaaaggctgtgatgatgcacgtgtgcatccaccagtgcaataaaggctgtgggaacattcagaataatggacagcaatgtagcgtcaaggatcctcagccaggaaaacatttccagtgttttaaatacatatccccaaagcaaaacagaagattaaaagaaagacagcagcagatatttgaacccgttgctgaacagcatgttcctccactgatagcaaaagaccacgaagggaggtgaatcagctgggcrtgttctgtttacagcccaagggccagagataggcaaggaatacaattgcaaaaggatattatgctcaaggggaagaattctcatgtgtttgcagctgggatgacaactattattactatgctattaccgcatgtatacttgcatccagttcattcagttatggcatcagtatcagaggagaacttccctcaccattcctaaaccattctgtaagatgtatgttaatgctgaatatggtcaagaaatgtgtttccacaacttcctattccagcacgctgctccacaggactaacatctaa

SEQ ID NO: 96403 - DNA, 600 bp, Chicken  19866894913716_1
cggaagatgcgagggctgtcagatgccgctcttcaaatgcatgcagagcaactttgggttcagcagtgacactggtgctccatctgctcccgctgtcgtttgttcatttggtgtgcctgtgccaacacttctgcgaacaaagccacatccaaaccctttgttactgctctgctgaccgaggaatcacactcagcccgatggcagtgccctgtgcatgccctgccccaaccccctgccccaacatctgtgcaatgctttcccaaagctgcttcaaagctgccctccctcattttgctgccrtgtagcacagctgtgccctgcttagagggcaggcatgactcctgtacaaagcattygaggtagtagtataaattttgcagtcatagagcccctcactctattttcacattagtcagtacctgaacattaccttaatgtgtcattttttcattttgccattgtcaccaagtattgctcagaccttgtagctccctacaaccccctgaaaggagggtgtagcaaagtgagggtcgacctctgctccccggtaacggtgacaggacaagagggaatggcctcacgttgcagcaggggaggttt

SEQ ID NO: 96404 - DNA, 600 bp, Chicken  19866894913716_2
ggttcagcagtgacactggtgctccatctgctcccgctgtcgtttgttcatttggtgtgcctgtgccaacacttctgcgaacaaagccacatccaaaccctttgttactgctctgctgaccgaggaatcacactcagcccgatggcagtgccctgtgcatgccctgccccaaccccctgccccaacatctgtgcaatgctttcccaaagctgcttcaaagctgccctccctcattttgctgccrtgtagcacagctgtgccctgcttagagggcaggcatgactcctgtacaaagcattygaggtagtagtataaattttgcagtcatagagcccctcactctattttcacattagtcagtacctgaacattaccttaatgtgtcattttttcattttgccattgtcaccaagtattgctcagaccttgtagctccctacaaccccctgaaaggagggtgtagcaaagtgagggtcgacctctgctccccggtaacggtgacaggacaagagggaatggcctcacgttgcagcaggggaggtttggattggatgttgggagaaatttcttctcagcaggagcaatactgcattggcacag

SEQ ID NO: 96405 - DNA, 600 bp, Chicken  19866894913716_3
cagcagtgacactggtgctccatctgctcccgctgtcgtttgttcatttggtgtgcctgtgccaacacttctgcgaacaaagccacatccaaaccctttgttactgctctgctgaccgaggaatcacactcagcccgatggcagtgccctgtgcatgccctgccccaaccccctgccccaacatctgtgcaatgctttcccaaagctgcttcaaagctgccctccctcattttgctgccrtgtagcacagctgtgccctgcttagagggcaggcatgactcctgtacaaagcattygagytagtagtataaattttgcagtcatagagcccctcactctattttcacattagtcagtacctgaacattaccttaatgtgtcattttttcattttgccattgtcaccaagtattgctcagaccttgtagctccctacaaccccctgaaaggagggtgtagcaaagtgagggtcgacctctgctccccggtaacggtgacaggacaagagggaatggcctcacgttgcagcaggggaggtttggattggatgttgggagaaatttcttctcagcaggagcaatactgcattggcacaggctg

SEQ ID NO: 96406 - DNA, 600 bp, Chicken  19866894913716_4
agcagtgacactggtgctccatctgctcccgctgtcgtttgttcatttggtgtgcctgtgccaacacttctgcgaacaaagccacatccaaaccctttgttactgctctgctgaccgaggaatcacactcagcccgatggcagtgccctgtgcatgccctgccccaaccccctgccccaacatctgtgcaatgctttcccaaagctgcttcaaagctgccctccctcattttgctgccrtgtagcacagctgtgccctgcttagagggcaggcatgactcctgtacaaagcattygaggyagtagtataaattttgcagtcatagagcccctcactctattttcacattagtcagtacctgaacattaccttaatgtgtcattttttcattttgccattgtcaccaagtattgctcagaccttgtagctccctacaaccccctgaaaggagggtgtagcaaagtgagggtcgacctctgctccccggtaacggtgacaggacaagagggaatggcctcacgttgcagcaggggaggtttggattggatgttgggagaaatttcttctcagcaggagcaatactgcattggcacaggctgc

SEQ ID NO: 96407 - DNA, 600 bp, Chicken  19866894913716_5
gcagtgacactggtgctccatctgctcccgctgtcgtttgttcatttggtgtgcctgtgccaacacttctgcgaacaaagccacatccaaaccctttgttactgctctgctgaccgaggaatcacactcagcccgatggcagtgccctgtgcatgccctgccccaaccccctgccccaacatctgtgcaatgctttcccaaagctgcttcaaagctgccctccctcattttgctgccrtgtagcacagctgtgccctgcttagagggcaggcatgactcctgtacaaagcattygaggtygtagtataaattttgcagtcatagagcccctcactctattttcacattagtcagtacctgaacattaccttaatgtgtcattttttcattttgccattgtcaccaagtattgctcagaccttgtagctccctacaaccccctgaaaggagggtgtagcaaagtgagggtcgacctctgctccccggtaacggtgacaggacaagagggaatggcctcacgttgcagcaggggaggtttggattggatgttgggagaaatttcttctcagcaggagcaatactgcattggcacaggctgcc

SEQ ID NO: 96408 - DNA, 600 bp, Chicken  19866894913726_1
aatgaagtaggtatgggatgccttttacaacataattgctgataaacgttttacaagaaaagggtgctgataagctgctgtcaccagaataagtgtgacttctcagcttcatgtcacataattgattacattcacatactgatgttgcaaaagcattttttttcttagtttttcttgaatgttataaatggtaccatcttcatgaggcatatgggtgccatcatgcaacttttcaactacctagcaatatcagatgtcagtttaagattgaaaaacaagtaaacgccacttaaacagcartgaagggcagacaagcaaaatagataaacaaagccatgaaaatttggactcatgcagaaattgtcccagagtcatatttactgataaggtgattcccagggttctggtcttacctggaaggcaagcgttcaagctgcatagtgtcaaaaatgatgattccctcaccacactgtaatgttcccaaaagctcaactctttctcaaatgacctgtacaagcctcattctacatgaaggattcctcactgggaatctctgtcctcagcaacaaaccagatccagatgtgtggccatcagacctg

SEQ ID NO: 96409 - DNA, 600 bp, Chicken  19866894913782_1
tccactatgaaaaaggtaaagactcttcaactgactgtggcatgtgctgaggtggagcacaacaatttcagagtaacgaaaaaaccttaagacccagtttgactgcttctgcaaaagcatggactttactggagctgtagcagcaaacaccgtaaacttagctcactaaggctttttgatcttgagatatatactaaaatgtaaaacctcaatacttcatttatctaaaggggatttatttaaatagaaataatttgtggttgcacagaaagaatgcttgtttatataccatctaatatraaacacatgtaaagataaatctttgtgtttcagatctttagtgtcatacaaacacaggactgtgttatcaagtcccatcctcttgtcttgaaggtaagcaaagcacggtccctctgtcaccctactcctcgtgctggtcagtgccccaacacctcactgctgctgtgattaaatatctactaatttccaacctggttttactaaaagccatcataaaccaatcaacggtcactactgtcaacacagtcttttagtatcaaagagaaacttccccctcttatttgttttacctcctctgcc

SEQ ID NO: 96410 - DNA, 600 bp, Chicken  19866894913787_1
atctgtactactgcaccataacaacaacaacaaaaatatatacaaatataggccaaaatagagtaagccattcgtatatactgtaaaatcacaatctgtgggatagccctcctgtgagtttcatatgatgtctgtgaatacgttcttgagaaacaatgcttttgtctaaactgtagaggaacttctcatttcagctgaaaaggcagctctgtgccttaaagatgcaaaaatagtttatccgtacacagttattgctgtattgaagctgtagagttcacatcagaagtttagcattaatgkaatgtaacacctaaattatggagttattgtagttataccacagaagaggcatagccatgcagttatgatcaaataggcttcaagtgttcagtgattaaacaagtttaattggctttttactttgttacttacttcctgcctctctgtattgtttgaacaattctgcattgagcacgtagtttttccaagtactcattttctcatttatcttagtttccaaagtagacaggatttctgttgcatttttagacaatttagtatatactcgtaatgtgatgttgctttactatgttttttaca

SEQ ID NO: 96411 - DNA, 600 bp, Chicken  19866894913966_1
atttttcgttttcaaaagttacatgaaaaacatgtattttctttctcccaacgttattctgtagtgcaaacctctcaaatacaaaatacgtagtttaccaacaggaagatgaagtgactaaaggaggaaagcaacttctaagttttcttgaaaaagcagcctctgaatcagatcttcaaatggaaggactggcatctggtttcaacaaaaatatttttatttcttctgtctcctattaagggcatttgtatgttttctctttcagttctgaatgaagttagggctgttgcttaaagattrtgtggctgagcggctgtcactcgtaccgctgggctgcagcctggcttccagctcagagatcccgtggtgtttttgctgcagggagttatagcaggaaaggtacctgagtgcattaagtgcagtttcaatccaaattcaggcctaaattgtgcctaagtcccaactgagcgttgtcctacaagatgtctatggcctctagaaatgcctggccagtagcaagcggagtcccagacatgaggtagatttttagatcacttccatgtggctatagtctgtctgggccagagtttccagttatcc

SEQ ID NO: 96412 - DNA, 600 bp, Chicken  19866894913968_1
ggcagcagtaggtaactcatagagctggaactcaagcggtgctagcaactgggactcagcaaatgcacgcattgaggctcgggagcccaaatgcagcaaattcagcagcctctcctatgaaatacagcattgctaaaaaccttacttgtactcagaaatggtcagacatggctcaaagaatggttctgttctgcttagtgctgggagaacactaggcaaggctgaacgcttttcacgttgcagaagcagtgaaggtatcagactccacatcagctctatctggagtgaaactaatgcctytaagcagcacrtctttttggctttgagccttcttttcatggttgttttaccagatggtgatttatggttgcctttaagaaaaatgtacgtatggtcatccttggagagtctgaaggcaactcaaaactatggcttcccttacctggtgttggtgagtcccatctcaattaggaccctgcaggagtgatccccagaggctgtttccaaccagtgcttctatggttctcctccagggagacttggaaggaggtgctgcatcctgctggcccacacatcaaaaattgccaactaatagaggag

SEQ ID NO: 96413 - DNA, 600 bp, Chicken  19866894913968_2
gtaactcatagagctggaactcaagcggtgctagcaactgggactcagcaaatgcacgcattgaggctcgggagcccaaatgcagcaaattcagcagcctctcctatgaaatacagcattgctaaaaaccttacttgtactcagaaatggtcagacatggctcaaagaatggttctgttctgcttagtgctgggagaacactaggcaaggctgaacgcttttcacgttgcagaagcagtgaaggtatcagactccacatcagctctatctggagtgaaactaatgcctytaagcagcacrtctttttggctttgagccttcttttcatggttgttttaccagatggtgatttatggttgcctttaagaaaaatgtacgtatggtcatccttggagagtctgaaggcaactcaaaactatggcttcccttacctggtgttggtgagtcccatctcaattaggaccctgcaggagtgatccccagaggctgtttccaaccagtgcttctatggttctcctccagggagacttggaaggaggtgctgcatcctgctggcccacacatcaaaaattgccaactaatagaggagcagtaatttcc

SEQ ID NO: 96414 - DNA, 599 bp, Chicken  19866894914150_1
  misc_feature (1)..(175): n is any nucleotide
nnnnnnnnnnnnnnnnnnnnnnnnnnnnnnnnnnnnnnnnnnnnnnnnnnnnnnnnnnnnnnnnnnnnnnnnnnnnnnnnnnnnnnnnnnnnnnnnnnnnnnnnnnnnnnnnnnnnnnnnnnnnnnnnnnnnnnnnnnnnnnnnnnnnnnnnnnnnnnnnnnnnnnnnnnnnnnnacgatgcaggatctatatttcagaaggaatgaagggaagatgaaggtttcaaggttcctggcatcctatgttgcagctgtcagttgaggttcaggctggatatcaggaaaaggtacttcaccagrgagtggccaggcactggaacaggctccccaggccagtaagaagcatctagataatgttctcagacatggggtctgatttttgtgtggagccaggagytggactcaacctttacaggtcccccttycaactaatgatattctatgattctatgaactggcaatatggtttaaaggtctctttctcctcttcctaaccagaagcaccatcagctgcatagtgagaaagaaaaagggggatgataattaccctcttgcacagcccatcaagatcagagagatgatctgccgaagaccttgat

SEQ ID NO: 96415 - DNA, 599 bp, Chicken  19866894914150_2
  misc_feature (1)..(78): n is any nucleotide
nnnnnnnnnnnnnnnnnnnnnnnnnnnnnnnnnnnnnnnnnnnnnnnnnnnnnnnnnnnnnnnnnnnnnnnnnnnnnnacgatgcaggatctatatttcagaaggaatgaagggaagatgaaggtttcaaggttcctggcatcctatgttgcagctgtcagttgaggttcaggctggatatcaggaaaaggtacttcaccagrgagtggccaggcactggaacaggctccccaggccagtaagaagcatctagataatgttctcagacatggggtctgatttttgtgtggagccaggagytggactcaacctttacaggtcccccttycaactaatgatattctatgattctatgaactggcaatatggtttaaaggtctctttctcctcttcctaaccagaagcaccatcagctgcatagtgagaaagaaaaagggggatgataattaccctcttgcacagcccatcaagatcagagagatgatctgccgaagaccttgatagcttcatcataygtttttctctctttttattgtcataatgaaggattcaaatggtaacatcaactctgagcacagataggcactagcattatctga

SEQ ID NO: 96416 - DNA, 599 bp, Chicken  19866894914150_3
  misc_feature (1)..(50): n is any nucleotide
nnnnnnnnnnnnnnnnnnnnnnnnnnnnnnnnnnnnnnnnnnnnnnnnnnacgatgcaggatctatatttcagaaggaatgaagggaagatgaaggtttcaaggttcctggcatcctatgttgcagctgtcagttgaggttcaggctggatatcaggaaaaggtacttcaccagrgagtggccaggcactggaacaggctccccaggccagtaagaagcatctagataatgttctcagacatggggtctgatttttgtgtggagccaggagytggactcaacctttacaggtcccccttycaactaatgatattctatgattctatgaactggcaatatggtttaaaggtctctttctcctcttcctaaccagaagcaccatcagctgcatagtgagaaagaaaaagggggatgataattaccctcttgcacagcccatcaagatcagagagatgatctgccgaagaccttgatagcttcatcataygtttttctctctttttattgtcataatgaaggattcaaatggtaacatcaactctgagcacagataggcactagcattatctgattcagcatttatctatgatactttggtt

SEQ ID NO: 96417 - DNA, 535 bp, Chicken  19866894914150_4
actggaacaggctccccaggccagtaagaagcatctagataatgttctcagacatggggtctgatttttgtgtggagccaggagytggactcaacctttacaggtcccccttycaactaatgatattctatgattctatgaactggcaatatggtttaaaggtctctttctcctcttcctaaccagaagcaccatcagctgcatagtgagaaagaaaaagggggatgataattaccctcttgcacagcccatcaagatcagagagatgatctgccgaagaccttgatagcttcatcataygtttttctctctttttattgtcataatgaaggattcaaatggtaacatcaactctgagcacagataggcactagcattatctgattcagcatttatctatgatactttggttttacactaatagttgacaggctgaagctcagtgaagccataatcctaaaagtaaaaacaatgaaataatcagctgatagaaatagcaataggacctattttaagaggatgcatatgtgtatat

SEQ ID NO: 96418 - DNA, 599 bp, Chicken  19866894914190_1
  misc_feature (1)..(161): n is any nucleotide
nnnnnnnnnnnnnnnnnnnnnnnnnnnnnnnnnnnnnnnnnnnnnnnnnnnnnnnnnnnnnnnnnnnnnnnnnnnnnnnnnnnnnnnnnnnnnnnnnnnnnnnnnnnnnnnnnnnnnnnnnnnnnnnnnnnnnnnnnnnnnnnnnnnnnnnnnnnnnnnnncctgaattctggagcagttggctctgctccccttacgaacacaaccatctacccgaaagtatgggagcttggctgggttttgccccccccccccatctccatgcagagacccttgtgccctccccaggtatcggacatycccatcatccaggtctttgctgaggccacggtgctgcctgcattccccttcatctttgccaggtttgatggggtcctgggcatgggctaccccagccaggccattgatggcatcacccccgtcttcgaccggatcctctcccagcagatcctcaaggaggacgtgttctctgtctactacagccggtgggtctcgggattgggagggggttgctttgcaaggttgagggcattgcagcctcagaatgctggggctacagcttgggactgtgaagaagccatgggtggagctgtgggacc

SEQ ID NO: 96419 - DNA, 600 bp, Chicken  19866894914192_1
gattccatatgtaacacagggaaggggtggataaaccccccacatgcacagcagctggatttgtctcagcactgcccctttaggaactccaccatggctatgaacttcagcaccgaacacaagtggcagcctggcacggcgctgccccacatgcagcataggattgcagtgctctgagccccagcctgcaccacccatggctccgtgtgcaccatgttaatagcaggtggaccaaagccagggtaatggccagcactccccactgagacaaagaggccagtggcctggagtggccacctygttactgtcccaccatcccactattacagcacactgcacagactgaggttttgtcctggctccattatctgtcttttgagtagattttaatgctgcaattgcctttccagaaaggccargctttcacaggcaggaataactaggaataatctctctccaggaggaggtatgcagcttgctggggagccacaaaagagctgcatcccactgttccagcaaaatcagctcagtgcttcaccttgttcagcttgctcattgaccacagacagaggcaggtacccagctgctgctgtttaaggg

SEQ ID NO: 96420 - DNA, 592 bp, Chicken  19866894914192_2
caagtggcagcctggcacggcgctgccccacatgcagcataggattgcagtgctctgagccccagcctgcaccacccatggctccgtgtgcaccatgttaatagcaggtggaccaaagccagggtaatggccagcactccccactgagacaaagaggccagtggcctggagtggccacctygttactgtcccaccatcccactattacagcacactgcacagactgaggttttgtcctggctccattatctgtcttttgagtagattttaatgctgcaattgcctttccagaaaggccargctttcacaggcaggaataactaggaataatctctctccaggaggaggtatgcagcttgctggggagccacaaaagagctgcatcccactgttccagcaaaatcagctcagtgcttcaccttgttcagcttgctcattgaccacagacagaggcaggtacccagctgctgctgtttaagggatgtatacatactatctttcctcaaaagaaaaagcaacaaaactttagatgttcaaaacctccagatgccttcagggcatctggcacagcttccaaaagcagcactgcaag

SEQ ID NO: 96421 - DNA, 599 bp, Chicken  19866894914286_1
  misc_feature (1)..(222): n is any nucleotide
nnnnnnnnnnnnnnnnnnnnnnnnnnnnnnnnnnnnnnnnnnnnnnnnnnnnnnnnnnnnnnnnnnnnnnnnnnnnnnnnnnnnnnnnnnnnnnnnnnnnnnnnnnnnnnnnnnnnnnnnnnnnnnnnnnnnnnnnnnnnnnnnnnnnnnnnnnnnnnnnnnnnnnnnnnnnnnnnnnnnnnnnnnnnnnnnnnnnnnnnnnnnnnnnnnnnnnnnnnnnnnccaactggcaatgaaatgatgctcttgctccccagtagcttcagtacaaagcatcagtgcgtggcttcacgtacagtyttggaatgtttttaagctgtagaagagtaatatcccctcctgaccaagctattttgcctcttggtacagcttttggtattgcccatgcaacagcctgcaagcagcaaacacgttgggtcaaaagacagacctgaaggatgggattaaggaaacaagtgacaggccttggaggatttcatcatctagttttcccactttctgtctcagttcaattactgcttctcagcctcctacaactgycctccccatctcctatttggcaactgtgggagtcagcagtgtttcattaggctctgcag

SEQ ID NO: 96422 - DNA, 600 bp, Chicken  19866894914286_2
atgctcttgctccccagtagcttcagtacaaagcatcagtgcgtggcttcacgtacagtyttggaatgtttttaagctgtagaagagtaatatcccctcctgaccaagctattttgcctcttggtacagcttttggtattgcccatgcaacagcctgcaagcagcaaacacgttgggtcaaaagacagacctgaaggatgggattaaggaaacaagtgacaggccttggaggatttcatcatctagttttcccactttctgtctcagttcaattactgcttctcagcctcctacaactgycctccccatctcctatttggcaactgtgggagtcagcagtgtttcattaggctctgcagccattctgccaaagttgtagaaaggtttatatgacttctctgacaatttctattttacagcaaagttttacagtgctgtgtcaggaaagagaagcatatgttaagagaagtgagccaaaggtatgtgtgaaagggggagaggggaagcaaaatcctgagaaaagctgagctctgaagcatcagagaaagaacacatgctctgaactgcagtcaggaaaatatggtttcctttcagcatggt

SEQ ID NO: 96423 - DNA, 600 bp, Chicken  19866894914329_1
catttaacccgaaaatcacgcattttctcttagagaatccagcatttaacccgaaaatcacgcattttcttttagcaaatcccccatttaacccgaaaatcacgcgttttctcttcgcaaatcccacatttaattgaaaatcacgcgttttctctttgcaaatcccccatttgacccgaaaatcatgcgttttctcttcgcaaatcccccattcaagcaaaaatcatgcgttttctcttcgcaaatcccctatttaacccaaaaatcacgcgttttctctttgcaaatcccccatttaasccgaaaatcacgcgttttctcttcacaaatcccccatttatccaaaaatcacgcgttttctctttgcaaatcccccatttaagcaaaaatcacttgttatctcttcgcaaatcccccatttaaccgaaaatcatgcattttctcttcaagaatcccccatttaaccgaaaatcacgcgttttctcttcgcaaatcccccatttaaccaaaaatcacgcgttttctcttcgagaatcccccatttaaccgaaaatcacgtgttttctcttagccaatcccccgtttaagcgaaaatcatgc

SEQ ID NO: 96424 - DNA, 600 bp, Chicken  19866894914419_1
tccattaactgtaatctcttaactgaagatgtagtccttaaatagcatggatatatggcttatacatatggtgtttacatgtatttacatttgtatcttacttagaaacaaattgaaatggaaattaatgttactgcatcactctgtggctattggctacaggaatacagtgatttggcttctgttcattatttattatttatttacttattctagagtcttaagcaaccgtggaagatgatcatatgtttgcagggctatgagctgtgtgagcttgctgctcaagttactgctttctayctcaaagtgtttctttctagccctgctcccttcatcctctcacccagtycaaaacactgggatgtgataaaattaattactgtctatcgttgccagagtaaaatttccttttgattcccatasccactggataaggaaaaaaaatgcagtgggaaaaagaaacaagcagaactgatggtgtattcaagagaacaaattacagatgaagcaaaggcaattactagaatggagrgtcctaacctgtgcccaaccttgactcaggagtgacaaagattatctaaactgatcagagtttgcgtt

SEQ ID NO: 96425 - DNA, 600 bp, Chicken  19866894914419_2
gatatatggcttatacatatggtgtttacatgtatttacatttgtatcttacttagaaacaaattgaaatggaaattaatgttactgcatcactctgtggctattggctacaggaatacagtgatttggcttctgttcattatttattatttatttacttattctagagtcttaagcaaccgtggaagatgatcatatgtttgcagggctatgagctgtgtgagcttgctgctcaagttactgctttctayctcaaagtgtttctttctagccctgctcccttcatcctctcacccagtycaaaacactgggatgtgataaaattaattactgtctatcgttgccagagtaaaatttccttttgattcccatasccactggataaggaaaaaaaatgcagtgggaaaaagaaacaagcagaactgatggtgtattcaagagaacaaattacagatgaagcaaaggcaattactagaatggagrgtcctaacctgtgcccaaccttgactcaggagtgacaaagattatctaaactgatcagagtttgcgttggattaagacatgtttgagggttggctgtgctttgccaaaaggaaaaaa

SEQ ID NO: 96426 - DNA, 569 bp, Chicken  19866894914419_3
attaatgttactgcatcactctgtggctattggctacaggaatacagtgatttggcttctgttcattatttattatttatttacttattctagagtcttaagcaaccgtggaagatgatcatatgtttgcagggctatgagctgtgtgagcttgctgctcaagttactgctttctayctcaaagtgtttctttctagccctgctcccttcatcctctcacccagtycaaaacactgggatgtgataaaattaattactgtctatcgttgccagagtaaaatttccttttgattcccatasccactggataaggaaaaaaaatgcagtgggaaaaagaaacaagcagaactgatggtgtattcaagagaacaaattacagatgaagcaaaggcaattactagaatggagrgtcctaacctgtgcccaaccttgactcaggagtgacaaagattatctaaactgatcagagtttgcgttggattaagacatgtttgagggttggctgtgctttgccaaaaggaaaaaaaaggcaataaggaaatgatttttagaaagaagaaagattatca

SEQ ID NO: 96427 - DNA, 460 bp, Chicken  19866894914419_4
ggaagatgatcatatgtttgcagggctatgagctgtgtgagcttgctgctcaagttactgctttctayctcaaagtgtttctttctagccctgctcccttcatcctctcacccagtycaaaacactgggatgtgataaaattaattactgtctatcgttgccagagtaaaatttccttttgattcccatasccactggataaggaaaaaaaatgcagtgggaaaaagaaacaagcagaactgatggtgtattcaagagaacaaattacagatgaagcaaaggcaattactagaatggagrgtcctaacctgtgcccaaccttgactcaggagtgacaaagattatctaaactgatcagagtttgcgttggattaagacatgtttgagggttggctgtgctttgccaaaaggaaaaaaaaggcaataaggaaatgatttttagaaagaagaaagattatca

SEQ ID NO: 96428 - DNA, 502 bp, Chicken  19866894914472_1
aaactaatgatttaatgaggtgaatgaagtatgaaaatctacattttcagaaaacgcctcttgaaaaaaacacatccaagctaaactacagacaccagacatgcaaggcgtagctatccgcaggtatcacaaacccaactacttgttacggaggcagaacacacagctggcagagcagtgctcatcacagcacagccttacagcccccgctgccacagagccacccaggtgtgcgctgctgccggcctctgaagcggcactcagctccaagcacacagcgtgacctcaaggggccatctsagaaatcaggaggagcccctaaaagctctgctgcactcatcaactagcttaaggaaaactgcattcacttccaactcaagtagggtttctgtacatggcagctcttctgccacagcgagccattctactctccacaactgttttagcttcccatgcggccaagtccaacacgactcaatgctacagagccattacccagctt

SEQ ID NO: 96429 - DNA, 600 bp, Chicken  19866894914474_1
ccttactgatacagagacagcttttttcactcagttcttcttgataaggcatgcttgttttttaaaatcatgttacttccgatgccaggttagagctgtgtgtgtacaagcagcaaactctgctcacagttttggctgggctgctttgagactgagtgtggcacagattagctgtccacagattaaggttgctgtatgtattgtgggttgacaggtattcttcacgttactctgagatgtctgtagactgaaaatcagatcacacttgtatggtttgcacaggctggagatttttttttwaatgttatcccatctccttctggtatatctcaacgtgattttcatgcatataaaatatattattttttgttattcttgtgttatctggattacttttcttccattatgtttgataaaataagacaaatgtaattggctactttattttcaaaagatggggaaaaagtgaacaactccagtagctaagtaatgctctactccacattccatagctcctttaacctgaaggagtctttggctaccattggtgaaaaggtgtgtgctgaagtcaacagctgcctttcccagcatggctttgca

SEQ ID NO: 96430 - DNA, 599 bp, Chicken  19866894914484_1
  misc_feature (1)..(182): n is any nucleotide
nnnnnnnnnnnnnnnnnnnnnnnnnnnnnnnnnnnnnnnnnnnnnnnnnnnnnnnnnnnnnnnnnnnnnnnnnnnnnnnnnnnnnnnnnnnnnnnnnnnnnnnnnnnnnnnnnnnnnnnnnnnnnnnnnnnnnnnnnnnnnnnnnnnnnnnnnnnnnnnnnnnnnnnnnnnnnnnnnnnnnnttgcttttggatttttgtttcttcccctaatttattctggttacttcatacttgtgtaaatgcctacctaattatgcaagctcacaatttgactaaaatggcaaggtaacagaaagartctgttactaatgatgtgaaagattgctctctgtctatatttattgttcaattccctgtgcattagcccttcagcatgtctagaaagatgtattcatatgagtagtgctatgattttgtctgcaggcagatttgtattttcaacagcatgaaagtgatctatagataaccagcactctgtactgaagaatcacttcgaataaatgcatagtagcttaagtctaagagattttgaatgaaatacttcaccatgaattcaattataagcagaacaccacctttactttgcataaactttca

SEQ ID NO: 96431 - DNA, 599 bp, Chicken  19866894914737_1
  misc_feature (1)..(16): n is any nucleotide
nnnnnnnnnnnnnnnngtgttgttttggaggagcaggtgctccaggattgaagctatcttggttgtaatgggatgcagggcacagtgcgctctatgtgccaaccccaaagccctagggaaggtgctgagtggctgcggggctgcaccccagggaaggtggaaagaaggcatccaggatgaccccgtagtcggggagaggaactcaccaggaatgagcagaagaagatgaaggagacaaagtagacgtaggccaggtcggtgccgcagcgctcgttctcattctgcccggacgtcgctgtygtgtccggctcrcagcccttgccctccaggcaggagagcatgatctcctgccatgcctcaccggtggcactcctgcaccgacacagccacgcwcagcagcagggaaggatgcagtggggaaggatatagagccctgtaccccccaacctgtagctgcttacctgaagaggagcatgagggagcccaggaagctgcggaagttgttgtgccggttaatgtggctttcctcatctagtttgatgttgccgaaaacctacagggtgggagggggaaagggttcaggcaaccccagtcctgcc

SEQ ID NO: 96432 - DNA, 599 bp, Chicken  19866894914737_2
  misc_feature (1)..(4): n is any nucleotide
nnnngtgttgttttggaggagcaggtgctccaggattgaagctatcttggttgtaatgggatgcagggcacagtgcgctctatgtgccaaccccaaagccctagggaaggtgctgagtggctgcggggctgcaccccagggaaggtggaaagaaggcatccaggatgaccccgtagtcggggagaggaactcaccaggaatgagcagaagaagatgaaggagacaaagtagacgtaggccaggtcggtgccgcagcgctcgttctcattctgcccggacgtcgctgtygtgtccggctcrcagcccttgccctccaggcaggagagcatgatctcctgccatgcctcaccggtggcactcctgcaccgacacagccacgcwcagcagcagggaaggatgcagtggggaaggatatagagccctgtaccccccaacctgtagctgcttacctgaagaggagcatgagggagcccaggaagctgcggaagttgttgtgccggttaatgtggctttcctcatctagtttgatgttgccgaaaacctacagggtgggagggggaaagggttcaggcaaccccagtcctgccccagaccagaag

SEQ ID NO: 96433 - DNA, 600 bp, Chicken  19866894914737_3
atgtgccaaccccaaagccctagggaaggtgctgagtggctgcggggctgcaccccagggaaggtggaaagaaggcatccaggatgaccccgtagtcggggagaggaactcaccaggaatgagcagaagaagatgaaggagacaaagtagacgtaggccaggtcggtgccgcagcgctcgttctcattctgcccggacgtcgctgtygtgtccggctcrcagcccttgccctccaggcaggagagcatgatctcctgccatgcctcaccggtggcactcctgcaccgacacagccacgcwcagcagcagggaaggatgcagtggggaaggatatagagccctgtaccccccaacctgtagctgcttacctgaagaggagcatgagggagcccaggaagctgcggaagttgttgtgccggttaatgtggctttcctcatctagtttgatgttgccgaaaacctacagggtgggagggggaaagggttcaggcaaccccagtcctgccccagaccagaaggtctccagggccacgagaggcaacgaagccccaaatccaggcaacatcctaccaacaacccaccgccaaggccacgatagga

SEQ ID NO: 96434 - DNA, 528 bp, Chicken  19866894914877_1
cgtatgcagagcttcgtgtgtgctgctcagtccctgcagctgcttatgacattgctgggcaaagagctaacagaatcactgctatggatttgatttagcttcatgtggtaaaaaaataaacatgtactgaaagattcaaaatcatctgtcatattacccttgcttcctgaataaccattctctcaaaatattttcctcacatctggcatcttgccctaaattagataccaagttccttgttttacatcactgattccgtattactagcattttcatccacaataaaagatgagttaaacycaggaattatttttcttatacatttctaagtttgcttacttctgagctggagaccaaaggattttggatattgtcattatttatttgtatattggacttctttacatattagatatattatttcttcatgtattctacctttagtattcaaccagcaaagtacttatatatgtacttaactcaatgcaatcactattctgcttaaatatatatgtaagtacttcaatt

SEQ ID NO: 96435 - DNA, 600 bp, Chicken  19866894914898_1
actgagtcaaaatggtgcatagatgcagaaggcagaaacatatctggcagcaaacagtctttcactgcaggcttatgttctgaaggcacactttccaagcagaccttggtgaaccagtccatgtcttgctgagctgggaaagaggacccaattttaacagcatatctcttggttgagccaacgtagtgtcacagaatcatggaatcatttgagttggaagggcgccttaaaggccatctgatcccactccctgcagtgaacagagacacccacagctccatctgtgctcagagccccatycagcctgaccttggctgtctccaacccaaggtcatccaccacctctctgggaaacctgttccagtgcctcacaactgtctttaaacctactgccacyttagcacagctctaaaccaattcaccatcctctgctagacgctggcacaaccatagcatgagtccaccaccatgggatgcttgcaaacaccttccattcatgacggggcagcggtgggaaacctgtttgaatcatttccattaagccatcaaactggcactcggcctacgcaaactgagctggtatctcactttcctgacagc

SEQ ID NO: 96436 - DNA, 600 bp, Chicken  19866894914898_2
agcagaccttggtgaaccagtccatgtcttgctgagctgggaaagaggacccaattttaacagcatatctcttggttgagccaacgtagtgtcacagaatcatggaatcatttgagttggaagggcgccttaaaggccatctgatcccactccctgcagtgaacagagacacccacagctccatctgtgctcagagccccatycagcctgaccttggctgtctccaacccaaggtcatccaccacctctctgggaaacctgttccagtgcctcacaactgtctttaaacctactgccacyttagcacagctctaaaccaattcaccatcctctgctagacgctggcacaaccatagcatgagtccaccaccatgggatgcttgcaaacaccttccattcatgacggggcagcggtgggaaacctgtttgaatcatttccattaagccatcaaactggcactcggcctacgcaaactgagctggtatctcactttcctgacagcatctctgagccaagacacgtttggctcgcaatcaaagcccttgcgctgctagcactatctgcaaagcagtcgctcccagcagccccgacggcttcat

SEQ ID NO: 96437 - DNA, 600 bp, Chicken  19866894915036_1
cttgtcaatggtattacagtaagaatcacccagactaaagaagaaagagttctgatggaagcagaactaacttcagcaagcagtaatccaacaccatgcatcacccctttcacactgaaggactgttataacaagatggtgtcgaaagtcatagactaaattaactccatgtacaatttactgggatggcctcccactgggagggggaagggaagtaagcaaaaggctgcttggtgttaagctgcttgctgggttaaaccacaacagcacattggaagaaacatactatcacatgcagtyagctgaacttacccagagctggaatgagacaggaaaaaaaaaccatcattatggtggtgtacgcatctgaggccagtaacaccaagccagactaggrgtcccaacactgaggaagcccttcgtgttgatacctccagccacaggaaaaggcagtgcctgcttaagtccagaaagtaaaacatttctgcattatgggaaggtttgcccataggaaaaccgatttgaactccagatgacagaactgcctgttcagtaagtcaggatcaagggcaatgctgttatccttcatgtccactgtga

SEQ ID NO: 96438 - DNA, 600 bp, Chicken  19866894915036_2
gcatcacccctttcacactgaaggactgttataacaagatggtgtcgaaagtcatagactaaattaactccatgtacaatttactgggatggcctcccactgggagggggaagggaagtaagcaaaaggctgcttggtgttaagctgcttgctgggttaaaccacaacagcacattggaagaaacatactatcacatgcagtyagctgaacttacccagagctggaatgagacaggaaaaaaaaaccatcattatggtggtgtacgcatctgaggccagtaacaccaagccagactaggrgtcccaacactgaggaagcccttcgtgttgatacctccagccacaggaaaaggcagtgcctgcttaagtccagaaagtaaaacatttctgcattatgggaaggtttgcccataggaaaaccgatttgaactccagatgacagaactgcctgttcagtaagtcaggatcaagggcaatgctgttatccttcatgtccactgtgaccctcacattaggacctccagtctcagggcaggatgaagaataaaactgaatgctaatactctaaaatgaagtgaaaaatcatttaaaaattcaaca

SEQ ID NO: 96439 - DNA, 599 bp, Chicken  19866894915172_1
  misc_feature (1)..(17): n is any nucleotide
nnnnnnnnnnnnnnnnngcgggcgcagctgcccgcctcccgccggccgtggttccaccgcatcgaccgcgccgtgctgctgggagcgctgccgctgcggggccgcagccgtagggtaagggggcgcggcggggcgggccggaggagcccggcggtggctgacggtggcgtgtgcccgcagctggtggccgaggagaacgtgcgcgccgtcctcactctgaacgaggagtacgagacccgcttcctctgctgctccgcgcaggtgagctccgctcggtctcgtggcggaccggggaggggmgggtgggaaatggacggcgggcggcgggacccctcaccgagccgctcaccgctcagccgcctcgctgccgtcacggcaccgctgcatctccccgtcggtgtctcggtaggctctgggttttctttctcgacggcgcaaagcggagtttaagcgggcgaatgtgccgctcgttgcaggagtgggaggcgctgggagtagagcagctgcgcctcggcaccgtggatctgaccggagtccccacgttggacaacttgcacaggggcgtcgagttcatcctgaagcaccgcgagcgcggtaac

SEQ ID NO: 96440 - DNA, 600 bp, Chicken  19866894915185_1
tatgaaaagcttggaatctaccaatgaaatgagctaacattactctaatgacataaaaggtctggatttgggacaggcatattgttatttgctgaatacaattgcctattgcctctttgttccctggattatcattaaggactgcatttttattctaacattcttgtttcttcctcctgtaaggcagtacatgcacaggttttttcccctttatcgctggaaggatcataattaagtagctaccaaaaattgtttttaaatccccagcagaaaattatttgcttcatcaaaaaaataatwgtttcattttacctaccttgcagattgggcctaattgcagtagatgcggagtaagccctttagaaacaaaaataccttagttaaaatagaattgcttgtattataattcatttaaacaaagcttcatttgatgataaaattgctatctaaactgataatagatttctcagttgcaaggaaatttacgttatttaaatgttggaaaactttctaaaaaccccttcaatcttgctagtagtcttcagattagggaaatgattcatattttacatacacatcaatgggggtggtgtgagttca

SEQ ID NO: 96441 - DNA, 593 bp, Chicken  19866894915186_1
ttgccatccaaccagatagaaagcaaccttgtttgcaatgcatagcaagcatacacaaacctcagactgtggcaaatctccaacgtgctgtaagctgttcagtcagcccacgggaccttggctgcttgagaagtaagggaaaaaggaattatgtcattattaacgttgaaatgacttcacacaggaagaggaaagttaaaaggcttgattttgaacgcagttctcctgggtcatgtgtggataaagcagtgctccagcaggatcccatttctgctggatttgcttgctttgccttccacyccaccctgtgtttttcacaagagctgatcgagataatgcagaggtaaagtcaagactatttggatactgttgtagcagattcagtgcctcttcttttacttatcccagttgaatttactatcaaattcaaaactgggtcactaagctatcccactctgtgcactgctccccctttgtgccatacaaaccagtttagccaagaactcacttccccccctgtgcccagcactgctcacgtgctttgcagaatggaggtggatttcagggcatggcgttcagctccagcatacgtg

SEQ ID NO: 96442 - DNA, 600 bp, Chicken  19866894915212_1
agattgagagcggcatgcaatgaaaacacacatataggtagattgccactggagaaatcattatttcccaaaatgaagaaatcagtcaaagaaatgactctaaaaagttgatatcacctgaagcacctgtgtaggaatgacttagttggggtcttctgtctttcctttggtatcaaagtagcaaataccagctcttctttgatttggatgatcagaacacacgaaagcatccctgcttctatgcagctggtcagtgctttcacttccacattttctacaccttgtgaaagttattatgcwttcttggccaaagaggtgctcctttaaagcaactgtcctgctattacgccaagcttgaaattatactgagatgcttcttaggtgggtgcttgtccttcctctctaacctcagggcatcttatggacagtaagaaataggtcaacccaaagcattaataacagcaygtatttcccaatacttttttttcttttcctttagaaatggaaaattcgctgcaaacatacagaatctttccaaacagtgattttttgaataaatccctatggagggatgatgcagaatatacttttatgtttggc

SEQ ID NO: 96443 - DNA, 588 bp, Chicken  19866894915212_2
tttggtatcaaagtagcaaataccagctcttctttgatttggatgatcagaacacacgaaagcatccctgcttctatgcagctggtcagtgctttcacttccacattttctacaccttgtgaaagttattatgcwttcttggccaaagaggtgctcctttaaagcaactgtcctgctattacgccaagcttgaaattatactgagatgcttcttaggtgggtgcttgtccttcctctctaacctcagggcatcttatggacagtaagaaataggtcaacccaaagcattaataacagcaygtatttcccaatacttttttttcttttcctttagaaatggaaaattcgctgcaaacatacagaatctttccaaacagtgattttttgaataaatccctatggagggatgatgcagaatatacttttatgtttggctaaattaggaatttcttctgaagacttgaccttctaatgacttggaaagtaatacttggtcaaacacttcttctcttctctccatttaaaaataataaaaaaaaagtaatggcatcattagtcaactgggctcttctcaaagtatcccaagca

SEQ ID NO: 96444 - DNA, 600 bp, Chicken  19866894915406_1
aggttggatgcgtgtggcatgcttccaggtctggagggcttcagctgatgggctgctctttggagcgttttctccccagggcaggaaaaattggaaggtaaacaattagatggctgccgtgcacagctctgtgtgtactgattactcgattccgcctgacacagagggatgtcagtgcctgcagtggtatctgctcctgtcactatcagcgtgcagcaggtgacactactgagggtgaagctcagctgagctgcccaaggagctgaagagaggggagggggggtgggggatgtaagatayaggtgacagcactaacaaatctgtaagtgcatgaatgaggatgggaggggtggggcagctggatgcaaagttggtgtgtcactgcacagctgctgcagctggatcaattctaacacaaaaatagcttcttctatcctccgctgccacagctacagcacaaaggtctctgtcagttaaatgatgcaaccaggcctttgcttttcctttgtagcagaaatagcacccaggagtaatcagagctaaaaggctccttatgaaaatgccaatccttttccacacccctcagccacctactgccat

SEQ ID NO: 96445 - DNA, 599 bp, Chicken  19866894915645_1
  misc_feature (1)..(79): n is any nucleotide
nnnnnnnnnnnnnnnnnnnnnnnnnnnnnnnnnnnnnnnnnnnnnnnnnnnnnnnnnnnnnnnnnnnnnnnnnnnnnnnctttgttaggtgatatggtaagaaaaaaaggatgtttaatttggcttagaaatatgggtttaaccttgtgctgtcttctgttgttgttgtttttaaacttaatatttatcactcagtgccttgattcttaaaactagcataataaacatattcgagtaactatttagctcatcattccagcctgtcatcaatattattccaaccaatagctacatctttayacatctttccacctccacattttacatagtacctgagtattccagaatatacagataataccaatttacataatgctttattaatatcagtttgttcagaatgctctattttacctcataagtactctctgaattgttgtttttggattttgttgttgttgttgtttccatgggagttatgtatgtaagctgcttaaayggttttcaagatcccactggaagtccctaattctttctcagtctttgatcactggtatctgagcgctttggggaaactttgtgtctgccattaagttaaa

SEQ ID NO: 96446 - DNA, 600 bp, Chicken  19866894915645_2
ttgattcttaaaactagcataataaacatattcgagtaactatttagctcatcattccagcctgtcatcaatattattccaaccaatagctacatctttayacatctttccacctccacattttacatagtacctgagtattccagaatatacagataataccaatttacataatgctttattaatatcagtttgttcagaatgctctattttacctcataagtactctctgaattgttgtttttggattttgttgttgttgttgtttccatgggagttatgtatgtaagctgcttaaayggttttcaagatcccactggaagtccctaattctttctcagtctttgatcactggtatctgagcgctttggggaaactttgtgtctgccattaagttaaaaggatggaactggaggagcattttgtcagttcaaagatagtttctgatatctaaagaaaaataatgtgttatttttaatatggtcaaaaacgttcatacttgcaccactgagcatggggttaacactttcttagggcttcacagcttttggcatctgttcaagtgaacaggtggaaggtaattttaatagaaaccttcca

SEQ ID NO: 96447 - DNA, 599 bp, Chicken  19866894915873_1
  misc_feature (1)..(35): n is any nucleotide
nnnnnnnnnnnnnnnnnnnnnnnnnnnnnnnnnnnataactccttcatttgacaaactgcctatatccaaatttactgagagtgaagtatcagcagtgctctcctaaggaccccctaaattcataaagcagccttacagctctataaaacgagggctgtaacagataggccccaaacccatgactcattctcccctgtcataaaactccgagtcccatcatgaagatgctccaacaggaaattgcacagattcttctcagagaagtaacaaaaggtggcaaagtattttagtgctgttgrttsttggtggggaaagatgtctgcgttcatctcgtgtcttcagtctgcttccctagctgcatttcggatatagattcctctacagctgaatttaagtatgtagatgtgtcttgagagccagcctgttggatgtccagtcattgcccagcacagtrgcactgctgtaacagagacagaatrtattacagcttaaattaagaatattgtctatatttagctctcctgagcagtgtcttctcaattagatgttwccacgcgcatcacttgtgcctgaacacatcggaggtgactttgtgagc

SEQ ID NO: 96448 - DNA, 599 bp, Chicken  19866894915873_2
  misc_feature (1)..(32): n is any nucleotide
nnnnnnnnnnnnnnnnnnnnnnnnnnnnnnnnataactccttcatttgacaaactgcctatatccaaatttactgagagtgaagtatcagcagtgctctcctaaggaccccctaaattcataaagcagccttacagctctataaaacgagggctgtaacagataggccccaaacccatgactcattctcccctgtcataaaactccgagtcccatcatgaagatgctccaacaggaaattgcacagattcttctcagagaagtaacaaaaggtggcaaagtattttagtgctgttgrttsttggtggggaaagatgtctgcgttcatctcgtgtcttcagtctgcttccctagctgcatttcggatatagattcctctacagctgaatttaagtatgtagatgtgtcttgagagccagcctgttggatgtccagtcattgcccagcacagtrgcactgctgtaacagagacagaatrtattacagcttaaattaagaatattgtctatatttagctctcctgagcagtgtcttctcaattagatgttwccacgcgcatcacttgtgcctgaacacatcggaggtgactttgtgagctcc

SEQ ID NO: 96449 - DNA, 600 bp, Chicken  19866894915873_3
ctgtaacagataggccccaaacccatgactcattctcccctgtcataaaactccgagtcccatcatgaagatgctccaacaggaaattgcacagattcttctcagagaagtaacaaaaggtggcaaagtattttagtgctgttgrttsttggtggggaaagatgtctgcgttcatctcgtgtcttcagtctgcttccctagctgcatttcggatatagattcctctacagctgaatttaagtatgtagatgtgtcttgagagccagcctgttggatgtccagtcattgcccagcacagtrgcactgctgtaacagagacagaatrtattacagcttaaattaagaatattgtctatatttagctctcctgagcagtgtcttctcaattagatgttwccacgcgcatcacttgtgcctgaacacatcggaggtgactttgtgagctcctgagaggaaggcacctacatatgataggttttgccaagttctccatatggctttattaattaaaacctggatccaacacatcccccttacggtgttaaagttgaggagaacgcaaatagagcaaaatactgcacagccccattgagctgcatg

SEQ ID NO: 96450 - DNA, 600 bp, Chicken  19866894915873_4
tgactcattctcccctgtcataaaactccgagtcccatcatgaagatgctccaacaggaaattgcacagattcttctcagagaagtaacaaaaggtggcaaagtattttagtgctgttgrttsttggtggggaaagatgtctgcgttcatctcgtgtcttcagtctgcttccctagctgcatttcggatatagattcctctacagctgaatttaagtatgtagatgtgtcttgagagccagcctgttggatgtccagtcattgcccagcacagtrgcactgctgtaacagagacagaatrtattacagcttaaattaagaatattgtctatatttagctctcctgagcagtgtcttctcaattagatgttwccacgcgcatcacttgtgcctgaacacatcggaggtgactttgtgagctcctgagaggaaggcacctacatatgataggttttgccaagttctccatatggctttattaattaaaacctggatccaacacatcccccttacggtgttaaagttgaggagaacgcaaatagagcaaaatactgcacagccccattgagctgcatgcagctctccaacggcatcttgcctt

SEQ ID NO: 96451 - DNA, 529 bp, Chicken  19866894915873_5
tcttctcagagaagtaacaaaaggtggcaaagtattttagtgctgttgrttsttggtggggaaagatgtctgcgttcatctcgtgtcttcagtctgcttccctagctgcatttcggatatagattcctctacagctgaatttaagtatgtagatgtgtcttgagagccagcctgttggatgtccagtcattgcccagcacagtrgcactgctgtaacagagacagaatrtattacagcttaaattaagaatattgtctatatttagctctcctgagcagtgtcttctcaattagatgttwccacgcgcatcacttgtgcctgaacacatcggaggtgactttgtgagctcctgagaggaaggcacctacatatgataggttttgccaagttctccatatggctttattaattaaaacctggatccaacacatcccccttacggtgttaaagttgaggagaacgcaaatagagcaaaatactgcacagccccattgagctgcatgcagctctccaacggcatcttgcctt

SEQ ID NO: 96452 - DNA, 545 bp, Chicken  19866894915952_1
actttctatgatgagcagtgcgataggaaggattgccttagagctgtgtgctggggcttttgcctaagtgagatgataatagtgtttacaacacatctcacaatagtgagatgatatgcagtgtttacaaaattgcttttccaaactaagcatgtaatgcatctaaagagtctgcctgtatcaataggctctaaagttgcagttttgtatgtatgcatatatatatatttttttcaaatgaggaaagtataatactgaggtcagcactgatgactcacatatttcgtggaaccacagaayggattgtgttggaaaggacctcaaagcccacccagttccaactctgtgctgtgggcagggctgccatctaccagcttagctgcccagggccctgtatttatgtatgtgtgggtgcagttataagctgctataggcataacaggaataatccctgaggttttacgtttgtatgtaatttctttcagttgtgtacaaaacagagtctgatgattctcaggtgggaagtattttttcttttcttcaca

SEQ ID NO: 96453 - DNA, 599 bp, Chicken  19866894916006_1
  misc_feature (1)..(55): n is any nucleotide
nnnnnnnnnnnnnnnnnnnnnnnnnnnnnnnnnnnnnnnnnnnnnnnnnnnnnnnattgtgttgcagatcttcatggtacataatcttttactctgtgggcatgcctgggataagactctgaaattaaatgcatttatttcatgcgtgtaagaaaagtcaatgcactgttagcaggattcattgtccacccttggcaaatgacctgagtgacaacgcctgtgaagatgaggctgtcaatgcaaatagttggaggcaggcagggggattcgattttttaagtgctttggaggacctttgcrtcaaactgttcatgttaaagagaaatacaggcatcagtcgggttaaatagtaaccacagggtttcagaaagacttttgaaccaaaggaattaggaagaagtttaagagaggcatgagtatttgcaacaggaagaccttgttgtggaaactgcaacagtcaaaatcttgtttgacactgccagtagtcacacctctgaccacacctcgggtttatctgcacacatgagcttgtggagtactttctcatcagcatcagcatcaaaagattgtgcagagcacttgcacactgagctgttgta

SEQ ID NO: 96454 - DNA, 600 bp, Chicken  19866894916084_1
ttttcagatgatttagagagaatgacaaccattacctgcagagacaaagaaacaagctttcaacgtggcaaaggccagtgcaggaagattcatctgccagtaggagctgggctaaaaattaaaagtaaacctgtcactgatgaagtgttaacgatgactaaggtgcaaaagtaaatactgaatgcctacagagggctttgaaagtgagaagaaatgcagattatcttcttaaatgttcagaacatgcaacagtgtttaagcagtttgttacccgagggcagaataaatctctccaggatrccattaattgttagtgttatcctggagcaagtgcttctacatattcacttgatctcaatctcttttcttgcattatgttactatgctgacgccccagctgtatttggtgttcattgtcattttcttgcaagtgagctaatgacactactataaaacacccagcagctggtggcatagcacaaataaacattattcaccatgaattacgaataccatgggaagcaataaagaaaactttctgaaacacatgtgataatgtatcccaactcttttcccactcccagctgctaaatcatctct

SEQ ID NO: 96455 - DNA, 600 bp, Chicken  19866894916085_1
tcatttataatggctaattccaaacagttcttctagtctgtcatttaactcttcttaaaaatcccatgtgcagcagttatgataaaaatcatttcttgaactgctgtcttccagagagctgaaaaacatgtcactactctctgcttgggctgacctgctggtattcgtgttcaatgcctaatatgtgcaatgtatgagaactggagagatgacagatgacatcaactgtaggaggtaaatttcagcattccaccttatttttcttagaagcattttaaaagatagcacactgtatcacargagccttctcatttcttgtgcggtaattgagacaaaacaccacagtgagttcatcacctttttcattatgttcatgtaatccatgatctacagggcttttttctgttgtttacacattactgctaatggcagttgtaacagtccaaatagtcctggaacagcatgcacatataccttgatcatatgatctgcatgcaaacataatgaagaactgttataaagtatctcataagattaaagactcacttctaatttttttgttttttttttttttcaattaaggtgcagttatgttacatc

SEQ ID NO: 96456 - DNA, 599 bp, Chicken  19866894916094_1
  misc_feature (1)..(132): n is any nucleotide
nnnnnnnnnnnnnnnnnnnnnnnnnnnnnnnnnnnnnnnnnnnnnnnnnnnnnnnnnnnnnnnnnnnnnnnnnnnnnnnnnnnnnnnnnnnnnnnnnnnnnnnnnnnnnnnnnnnnnnnnnnnnnnnnnnnnctgtctaaaatagcagcaaccagacaggtttgtgcaggttcctatcccgctcacattgtgacattcattaatttgttgattttaaaacctcgttgacatggaactgatgaggataaagtgcaaaatcctgcagcacggtaagcactcagtagttttagcatgtggcayggcttatgccacacagtgctcagtggtgctttgagcagatgaggagagggagctgagggtgtctctcaggagcattagatcagaggtgagtcagaagtttattgaggaaaatgctgaatggtgcccaagcaaccaaaaataagtctatgaatgaaccagacaaggctcagatgaaccactcactggcacattttcattgctgctgtttaaatttacttctctacagaatagttactaggccttttgcatcccaggtgttcaccattattattactctgtcagacgtaggcatcaaaact

SEQ ID NO: 96457 - DNA, 600 bp, Chicken  19866894916201_1
tccattagttttgtttattttattttgggttgtatgagcagggttgttataactgagtatgttttagcctcttttaaaatagtttatgctgtgacattatgaaagcttgtagtacaagggaagggataatatagggtaattaaaactcaagtttgctttatcttgaagtcttctttgagagtaaaacaattatggatgtatataaataaaaattgataaatagcttaacaggatttcctcacagacaaaattgacatgcatatacaagcactccttcctgtgtatgtgtatatgcaaaawttaatttggtgaaacaacactttgctgttgaaataatctgatttatcttagtgttgctrttgtagtaggtgaagaatacaaaatatggtrggaaaaatactactttacagatgtcagacttagaagtgacttccttttaaattttaaaactgttataaatgatctgtttattagaaagtatttaaaatttaagataatagggtagtggaatctatgacatattgccatatcttgttcrttttgtgtgggcttttattattattattatttttaatatgtatttttttatcttatttagta

SEQ ID NO: 96458 - DNA, 600 bp, Chicken  19866894916201_2
tgttttagcctcttttaaaatagtttatgctgtgacattatgaaagcttgtagtacaagggaagggataatatagggtaattaaaactcaagtttgctttatcttgaagtcttctttgagagtaaaacaattatggatgtatataaataaaaattgataaatagcttaacaggatttcctcacagacaaaattgacatgcatatacaagcactccttcctgtgtatgtgtatatgcaaaawttaatttggtgaaacaacactttgctgttgaaataatctgatttatcttagtgttgctrttgtagtaggtgaagaatacaaaatatggtrggaaaaatactactttacagatgtcagacttagaagtgacttccttttaaattttaaaactgttataaatgatctgtttattagaaagtatttaaaatttaagataatagggtagtggaatctatgacatattgccatatcttgttcrttttgtgtgggcttttattattattattatttttaatatgtatttttttatcttatttagtagtccaaacatactgctttgaatgaacaatttagttcattaaagagcaaagctaaatgca

SEQ ID NO: 96459 - DNA, 600 bp, Chicken  19866894916201_3
gtgacattatgaaagcttgtagtacaagggaagggataatatagggtaattaaaactcaagtttgctttatcttgaagtcttctttgagagtaaaacaattatggatgtatataaataaaaattgataaatagcttaacaggatttcctcacagacaaaattgacatgcatatacaagcactccttcctgtgtatgtgtatatgcaaaawttaatttggtgaaacaacactttgctgttgaaataatctgatttatcttagtgttgctrttgtagtaggtgaagaatacaaaatatggtrggaaaaatactactttacagatgtcagacttagaagtgacttccttttaaattttaaaactgttataaatgatctgtttattagaaagtatttaaaatttaagataatagggtagtggaatctatgacatattgccatatcttgttcrttttgtgtgggcttttattattattattatttttaatatgtatttttttatcttatttagtagtccaaacatactgctttgaatgaacaatttagttcattaaagagcaaagctaaatgcaatacaatttagaaagcataatggaaataata

SEQ ID NO: 96460 - DNA, 600 bp, Chicken  19866894916201_4
tcacagacaaaattgacatgcatatacaagcactccttcctgtgtatgtgtatatgcaaaawttaatttggtgaaacaacactttgctgttgaaataatctgatttatcttagtgttgctrttgtagtaggtgaagaatacaaaatatggtrggaaaaatactactttacagatgtcagacttagaagtgacttccttttaaattttaaaactgttataaatgatctgtttattagaaagtatttaaaatttaagataatagggtagtggaatctatgacatattgccatatcttgttcrttttgtgtgggcttttattattattattatttttaatatgtatttttttatcttatttagtagtccaaacatactgctttgaatgaacaatttagttcattaaagagcaaagctaaatgcaatacaatttagaaagcataatggaaataatatttcattagttactggaacttttataggggcctgtcgtgccactatgggataccactagtgtcttgtgcaataaacataaacataggtataaaaactagtactggcacgtgaaaaataaaaatgctatgtagcaataaatctagtgta

SEQ ID NO: 96461 - DNA, 600 bp, Chicken  19866894916344_1
aaggcagagatgcattaagtcactctcagtagtcacagccagcaagcttggcttgctgcagagtcagagcacagagaactgcagtgctatacacccacatccaaaggccattaccactaggaaggcagacaatgtttccccactctcttaagctgttcctggggaagcacgggtgcatgaggagtcccccctgcagagactggcaaaggcaacaccacattaacatgtgctgaccccaaccagtgccttccttggtgccatgcacctgggcagatccttcaggcagaccagtacagagamgtcctaagcatgagacgcactccacacccttgcatgcaaccctctcccctgccctgcttttacactatgacagcgcaggtaagaataaggaggggcaacatctagcatcaacacattttgcttctaacacaggcacagagccctgactttggctatcctgcttcaacagaacaatcaaacagcagatattagagatattaacatttttaactaatgaggtagttctactgtcgtacctcagattaatcagctctttaaaaataccaccattcacttctggagaccgagtggtaacaaact

SEQ ID NO: 96462 - DNA, 599 bp, Chicken  19866894916443_1
  misc_feature (1)..(76): n is any nucleotide
nnnnnnnnnnnnnnnnnnnnnnnnnnnnnnnnnnnnnnnnnnnnnnnnnnnnnnnnnnnnnnnnnnnnnnnnnnnnttgtttggcttgcagttgtagtgctgtgaaaacatgaataggattcttatcgttctgaattgatggcatctctgtttgtcaggcgtgattgtgtagttttcaagatgttttttctgttctttttcttacgacggggatggcttggaacttatacaagatggctgttaattctcatcctgtgttgatccccttgtgacaggagaaggctgtgtaatattccctaygaaaggggaaaaacaacctcctagatcaccacatgttagcaggtcccccatttctgtgcctgcaaccatcagctttggtacttgggagccttctgtgatgtgtagcgaggtgctggcttcacctgtggggccagagagcctggttccttgtcctcttatggggtgctaggtgtttggattcaaggtttgctaaggtggctgttgggagagatgttcttgcattatgccgttagttgcagggagcgcagtttatagaaggatgatggggragaaaggagatgcaggatctggggggaagt

SEQ ID NO: 96463 - DNA, 577 bp, Chicken  19866894916443_2
tgacaggagaaggctgtgtaatattccctaygaaaggggaaaaacaacctcctagatcaccacatgttagcaggtcccccatttctgtgcctgcaaccatcagctttggtacttgggagccttctgtgatgtgtagcgaggtgctggcttcacctgtggggccagagagcctggttccttgtcctcttatggggtgctaggtgtttggattcaaggtttgctaaggtggctgttgggagagatgttcttgcattatgccgttagttgcagggagcgcagtttatagaaggatgatggggragaaaggagatgcaggatctggggggaagtcaggcatttatcctgatggatccaggttggcaacagcagcagttaaacgttttgtgtatttgactgaaattgtccacaactgctaaccttccagaattagaaatttttagtagctggaatttggatgtcgggattttgggtgtcaggatgcaaaccttgcatgtttgcactctggaagccgtggcatcacggctgagcatcaatctcatcacgcacacatggcaccatttgcctgccatttccacca

SEQ ID NO: 96464 - DNA, 600 bp, Chicken  19866894916591_1
ggggctgctagctgtggggctgtttgttgcctcagcactaacaaatccccctcctgattagagctgacgggttacttactaaacaaaaatacagggaagaagagatcagctgaaagaattagagttgactgttgctgcacacaactgaatttttggttctgcttttaatattaatttgcaataaattgcaatttaaatgccttattttgtctctctctttcatcaccctggctgttgtttcttcattttttccccctacctgaatgggtacagcctgcaaccaaattaattttgtgatarttcagggtttatgtttctcagacattgacaatgtaaacgttctacatagaggtaaaatggatttcagatgtattctcatgcaaagtggcgatgaaggtgcagtgcataccttgcagtctccacaggatctatagaatcactgatgttggaaaagaccactacagtcatctagtccaactgctgatccatcatgaccgtgcccactaaccatatccctatgtttgtgaacacattagttcatgtataagggctcatttaaaggtaaaaggaggcccaaaacagaaccattgacaactggca

SEQ ID NO: 96465 - DNA, 469 bp, Chicken  19866894916695_1
cagaaaactaattagtcactgataaggctaagtccacttcccctcaatggcagccctgacctctgatggccatctaagggaacattctcccaccccaggttccagtggtggtggggagcattgggttcatccacgtacatacatgtgcacacacatgtgactgggatacgatgaagtccctaatcacacagcttccatttttgactcaaagcacactttgatctttctttttccaacataaacacaagcagagtacacagttagacagacaattcctgctgaaacaagctgctctactcyctgcctgggcagagaacaagacagcaaatgacaaaagacagctgttagctatgctgctgaaaccaccgcctttggatgttgtggaaaaaagcacagtgcaaggacctctaccgagcagagcaacatgggtttctgtgttcaggtgtcattccagagtcagcccaagcag

SEQ ID NO: 96466 - DNA, 599 bp, Chicken  19866894916724_1
  misc_feature (1)..(67): n is any nucleotide
nnnnnnnnnnnnnnnnnnnnnnnnnnnnnnnnnnnnnnnnnnnnnnnnnnnnnnnnnnnnnnnnnnnatgtctataagtctgctgttatctagaggtgcaagcagtgagccattaacacacttctccagtagtctcacagcagtgatgaaactcccttaaacttcagtgactgcttccagccacacttcacagtcagggtgagattatagccaatattttattttttatgtgattttttgatgatgtaatctactcctgtttttgaggcccatggtggcattcccagtccaagtagactygatcmtrggctgacagattagtcatagaatcatggaatcattaaggtcagaaaagacctctaagatcatatagttcaaccatccatctaacaccaatactgcccacatccctctgtgccacatctccactgttcatgaatgcttccagggatggtgactgtgccacctcccttgggcagcccattccagcaccttaccagtcttctggagaagaaattcttcctaatatccagcccaaacttcctctggcgcaacttgaggctattccctatcactgctattgggagcagagtctgacc

SEQ ID NO: 96467 - DNA, 599 bp, Chicken  19866894916724_2
  misc_feature (1)..(62): n is any nucleotide
nnnnnnnnnnnnnnnnnnnnnnnnnnnnnnnnnnnnnnnnnnnnnnnnnnnnnnnnnnnnnnatgtctataagtctgctgttatctagaggtgcaagcagtgagccattaacacacttctccagtagtctcacagcagtgatgaaactcccttaaacttcagtgactgcttccagccacacttcacagtcagggtgagattatagccaatattttattttttatgtgattttttgatgatgtaatctactcctgtttttgaggcccatggtggcattcccagtccaagtagactygatcmtrggctgacagattagtcatagaatcatggaatcattaaggtcagaaaagacctctaagatcatatagttcaaccatccatctaacaccaatactgcccacatccctctgtgccacatctccactgttcatgaatgcttccagggatggtgactgtgccacctcccttgggcagcccattccagcaccttaccagtcttctggagaagaaattcttcctaatatccagcccaaacttcctctggcgcaacttgaggctattccctatcactgctattgggagcagagtctgacctgcac

SEQ ID NO: 96468 - DNA, 599 bp, Chicken  19866894916724_3
  misc_feature (1)..(60): n is any nucleotide
nnnnnnnnnnnnnnnnnnnnnnnnnnnnnnnnnnnnnnnnnnnnnnnnnnnnnnnnnnnnatgtctataagtctgctgttatctagaggtgcaagcagtgagccattaacacacttctccagtagtctcacagcagtgatgaaactcccttaaacttcagtgactgcttccagccacacttcacagtcagggtgagattatagccaatattttattttttatgtgattttttgatgatgtaatctactcctgtttttgaggcccatggtggcattcccagtccaagtagactygatcmtrggctgacagattagtcatagaatcatggaatcattaaggtcagaaaagacctctaagatcatatagttcaaccatccatctaacaccaatactgcccacatccctctgtgccacatctccactgttcatgaatgcttccagggatggtgactgtgccacctcccttgggcagcccattccagcaccttaccagtcttctggagaagaaattcttcctaatatccagcccaaacttcctctggcgcaacttgaggctattccctatcactgctattgggagcagagtctgacctgcacct

SEQ ID NO: 96469 - DNA, 450 bp, Chicken  19866894916724_4
tcatggaatcattaaggtcagaaaagacctctaagatcatatagttcaaccatccatctaacaccaatactgcccacatccctctgtgccacatctccactgttcatgaatgcttccagggatggtgactgtgccacctcccttgggcagcccattccagcaccttaccagtcttctggagaagaaattcttcctaatatccagcccaaacttcctctggcgcaacttgaggctattccctatcactgctattgggagcagagtctgacctgcacctcaccacaacctcctttcagagcrctgtagagagcgataaggtcttccctgagcctcttcttctccaaaagtgagacgtacttcagctttgtactgaaagcagagagctcatgggccccagccctcaccaaacatccgaactaaagcagttttgaggaggggacagcatgaaag

SEQ ID NO: 96470 - DNA, 599 bp, Chicken  19866894916979_1
  misc_feature (1)..(31): n is any nucleotide
nnnnnnnnnnnnnnnnnnnnnnnnnnnnnnnttgggcttttctggtgattaaggacggttacgtgagtcatgcggcactaaaaattgtttttaaaggacgactcctcatgtttccctggcggcgtgcggttacgtgtaatgtgaactcactgcagcgtccgatggttgtgatttctgggaaaataggtgaaagtggagaggattcacccagcatacagggcaaacagatgccagagcgctaaagataaggctgcagagtgcggtcatcacaggaaagacactgctgccctcattgcacayagggcaaaggcatggctgtgcrggttggcacagcttcagggcacrgagaccccaaaggactgatccttccctgctccccttctgccctgcgcaggaaggtttggtgctgcaggagctcctggcaggcagctctgaacgtgcccaaacccaccgagcgcctgcgtgaatgaggccgctgctctgtgygcccagagagatgtaaacagcaaaacagaaggcaggcataaagcagagggaggtgtgaaagctgaaccccaagctggtgaaaggaaaagctgtgcggtgtacagcacggaccc

SEQ ID NO: 96471 - DNA, 599 bp, Chicken  19866894916979_2
  misc_feature (1)..(9): n is any nucleotide
nnnnnnnnnttgggcttttctggtgattaaggacggttacgtgagtcatgcggcactaaaaattgtttttaaaggacgactcctcatgtttccctggcggcgtgcggttacgtgtaatgtgaactcactgcagcgtccgatggttgtgatttctgggaaaataggtgaaagtggagaggattcacccagcatacagggcaaacagatgccagagcgctaaagataaggctgcagagtgcggtcatcacaggaaagacactgctgccctcattgcacayagggcaaaggcatggctgtgcrggttggcacagcttcagggcacrgagaccccaaaggactgatccttccctgctccccttctgccctgcgcaggaaggtttggtgctgcaggagctcctggcaggcagctctgaacgtgcccaaacccaccgagcgcctgcgtgaatgaggccgctgctctgtgygcccagagagatgtaaacagcaaaacagaaggcaggcataaagcagagggaggtgtgaaagctgaaccccaagctggtgaaaggaaaagctgtgcggtgtacagcacggacccagcccgccrggaacactgctga

SEQ ID NO: 96472 - DNA, 600 bp, Chicken  19866894916979_3
tgattaaggacggttacgtgagtcatgcggcactaaaaattgtttttaaaggacgactcctcatgtttccctggcggcgtgcggttacgtgtaatgtgaactcactgcagcgtccgatggttgtgatttctgggaaaataggtgaaagtggagaggattcacccagcatacagggcaaacagatgccagagcgctaaagataaggctgcagagtgcggtcatcacaggaaagacactgctgccctcattgcacayagggcaaaggcatggctgtgcrggttggcacagcttcagggcacrgagaccccaaaggactgatccttccctgctccccttctgccctgcgcaggaaggtttggtgctgcaggagctcctggcaggcagctctgaacgtgcccaaacccaccgagcgcctgcgtgaatgaggccgctgctctgtgygcccagagagatgtaaacagcaaaacagaaggcaggcataaagcagagggaggtgtgaaagctgaaccccaagctggtgaaaggaaaagctgtgcggtgtacagcacggacccagcccgccrggaacactgctgaagcactgtcattaacagcattaag

SEQ ID NO: 96473 - DNA, 600 bp, Chicken  19866894916979_4
gtgaaagtggagaggattcacccagcatacagggcaaacagatgccagagcgctaaagataaggctgcagagtgcggtcatcacaggaaagacactgctgccctcattgcacayagggcaaaggcatggctgtgcrggttggcacagcttcagggcacrgagaccccaaaggactgatccttccctgctccccttctgccctgcgcaggaaggtttggtgctgcaggagctcctggcaggcagctctgaacgtgcccaaacccaccgagcgcctgcgtgaatgaggccgctgctctgtgygcccagagagatgtaaacagcaaaacagaaggcaggcataaagcagagggaggtgtgaaagctgaaccccaagctggtgaaaggaaaagctgtgcggtgtacagcacggacccagcccgccrggaacactgctgaagcactgtcattaacagcattaaggcacagcgagcattcggttgctgcgcaccttcacagagaccatatccctcccctttggagtgctgaaggtttaagcaatgtgtgaaacgcctcagcctaaacctgaaatgctatccaaacttcattaaaaataatctgccc

SEQ ID NO: 96474 - DNA, 488 bp, Chicken  19866894916979_5
ggcatggctgtgcrggttggcacagcttcagggcacrgagaccccaaaggactgatccttccctgctccccttctgccctgcgcaggaaggtttggtgctgcaggagctcctggcaggcagctctgaacgtgcccaaacccaccgagcgcctgcgtgaatgaggccgctgctctgtgygcccagagagatgtaaacagcaaaacagaaggcaggcataaagcagagggaggtgtgaaagctgaaccccaagctggtgaaaggaaaagctgtgcggtgtacagcacggacccagcccgccrggaacactgctgaagcactgtcattaacagcattaaggcacagcgagcattcggttgctgcgcaccttcacagagaccatatccctcccctttggagtgctgaaggtttaagcaatgtgtgaaacgcctcagcctaaacctgaaatgctatccaaacttcattaaaaataatctgcccgtttgtaatt

SEQ ID NO: 96475 - DNA, 570 bp, Chicken  19866894917199_1
tcttgtaggcatctgtgcagttggcccggagcatgcagtgttacagaggagcagtagtgaaacaggatttttccaggaccctactaccctttcctctctctctgttcttttgctaatggctgcataagtaaccttttctctctgactcaaggttatattactaaagctgctatttcccttatttcaggcaagacagagatctctgccttatgctagcagtctcggagcatgatgagaagaccttgctgcttcagctttcactagcacagaataagaattttgtccttagactaatcttcmtttctccctcttctctttcagaccttataattttgctactctatgtctgaaaaaaaaaaaatacttaattagaaacagattggattggaatttttggagagcttagggctttctgttgcctagggctggcaaactcccagcacactttagatggcaattgcagaaaaatacctggtccattagaaatgtattgccaatccctgggttggaagctggtgctgattgcatctgcttttatggtcctaggcaggatttcatagctgctagacc

SEQ ID NO: 96476 - DNA, 568 bp, Chicken  19866894917420_1
acagcaggtgatgttagttgggatgcagtcttcttcaatgttattgcagtgacagctttgggttggtggctgacattaaaatgaaagaaaaatgttttctagcacaactcattcaagagccaaggccatgacaaagttgtttaatagtacagtgattacaaaaaagaattgacttttagagactttttacaggaagctggaagcaatatagaggcagaatgtcaaatcagatagtggcatgactttttaaactggaaaataaacttctttgaagatatcagctcaatagttcctttacaytaactaaatgcaatgatatcagcatctccagaatctgtaaggctggtttcttctatgttgctatgataccatgttattatttgatactatatgatttataaccaagtaacataagaataatggtcaagactaaaaatgaattattcaaatcaagaaaaggctcccattctaaacaacattgtttatcacacagtttccctcagataagtgaccctgtgaaactgatatccttaagcttcgtgtttactgtctttcaattgctccagaa

SEQ ID NO: 96477 - DNA, 600 bp, Chicken  19866894917423_1
tgcagcttcccttactagaaactaaaaatattcctaccacagaaaaaacaaacaaacaaaaaaacctctcatagaccttgcttgtaagagcaagatcatgcttctactatttttccgtgttggatgtcttctgattgacaaaattctccttattttgacaaataatgaaaagctctccaattttaacaaccagaaactcccacaaattttaaatacataaataaaatagattaccatttttattttctctaacttcattttcatcttcatcattctttcctatcatatttcaatccttcmtgcttgcttttggcaatttcatcaacagttcatggatttgtgaaagctattctgtttgaaagctgatattattcttgtgattagaaacagtaaagatgtagtgaaggatgaaagcaagtactgaatctgttgcttttaactacattttctttggtaccattccatgtaatcaaaagatgtataccgatgtttaaaaacaggagatgatttgataaaacaaatttatgatttctacaacaatgttcaacatttttttcagacttagggaacaaacaaacaaacaaaaatcaaaagcactac

SEQ ID NO: 96478 - DNA, 599 bp, Chicken  19866894917783_1
  misc_feature (1)..(178): n is any nucleotide
nnnnnnnnnnnnnnnnnnnnnnnnnnnnnnnnnnnnnnnnnnnnnnnnnnnnnnnnnnnnnnnnnnnnnnnnnnnnnnnnnnnnnnnnnnnnnnnnnnnnnnnnnnnnnnnnnnnnnnnnnnnnnnnnnnnnnnnnnnnnnnnnnnnnnnnnnnnnnnnnnnnnnnnnnnnnnnnnnnttccaaatctggaaaaatttcagaaccttttagttgatcttttaatttatcaatacacattcatgatgcttctggaagtggacaattacttaaaaaaaaaaaaaaaaaagagttatcaggamatatatgttccagtgtggttgtgtgagaaatgaaataaatactaaygcactgcagaactcagacattttagtcatcagggcctgttgtaacatcttcccttctgctttctcaatattggcagcttatgttttcaaggatttctttaaaacaatgagttggaaaaccaaatttaaaaacaatgatatgatgataaaatgaagctttaaggaaaatgttacctaagatttgtgaaaaagtctgaattcataagatcactaaacttacactgatttygaaagcattcttaaactacattccc

SEQ ID NO: 96479 - DNA, 599 bp, Chicken  19866894917783_2
  misc_feature (1)..(132): n is any nucleotide
nnnnnnnnnnnnnnnnnnnnnnnnnnnnnnnnnnnnnnnnnnnnnnnnnnnnnnnnnnnnnnnnnnnnnnnnnnnnnnnnnnnnnnnnnnnnnnnnnnnnnnnnnnnnnnnnnnnnnnnnnnnnnnnnnnnnttccaaatctggaaaaatttcagaaccttttagttgatcttttaatttatcaatacacattcatgatgcttctggaagtggacaattacttaaaaaaaaaaaaaaaaaagagttatcaggamatatatgttccagtgtggttgtgtgagaaatgaaataaatactaaygcactgcagaactcagacattttagtcatcagggcctgttgtaacatcttcccttctgctttctcaatattggcagcttatgttttcaaggatttctttaaaacaatgagttggaaaaccaaatttaaaaacaatgatatgatgataaaatgaagctttaaggaaaatgttacctaagatttgtgaaaaagtctgaattcataagatcactaaacttacactgatttygaaagcattcttaaactacattcccattaactacactcacaattaactcaaatgtacamatatatttataa

SEQ ID NO: 96480 - DNA, 600 bp, Chicken  19866894917783_3
aaaaaaaaaaaaagagttatcaggamatatatgttccagtgtggttgtgtgagaaatgaaataaatactaaygcactgcagaactcagacattttagtcatcagggcctgttgtaacatcttcccttctgctttctcaatattggcagcttatgttttcaaggatttctttaaaacaatgagttggaaaaccaaatttaaaaacaatgatatgatgataaaatgaagctttaaggaaaatgttacctaagatttgtgaaaaagtctgaattcataagatcactaaacttacactgatttygaaagcattcttaaactacattcccattaactacactcacaattaactcaaatgtacamatatatttataacaactccctgtcttactctctattagtcctataaactaagctggagctaagcagcagaaaagtactcacaggaaacatacaaacaaagccattgtttctgaacaccctcttgtgcaccagctgaggaatcaaatgtctcttgttaaacacttagggattcagcagattaaaactttgaaacatcaaacgaaaggctgaagggatagcctcaaaggatgtggcagtttcc

SEQ ID NO: 96481 - DNA, 600 bp, Chicken  19866894917783_4
aataaatactaaygcactgcagaactcagacattttagtcatcagggcctgttgtaacatcttcccttctgctttctcaatattggcagcttatgttttcaaggatttctttaaaacaatgagttggaaaaccaaatttaaaaacaatgatatgatgataaaatgaagctttaaggaaaatgttacctaagatttgtgaaaaagtctgaattcataagatcactaaacttacactgatttygaaagcattcttaaactacattcccattaactacactcacaattaactcaaatgtacamatatatttataacaactccctgtcttactctctattagtcctataaactaagctggagctaagcagcagaaaagtactcacaggaaacatacaaacaaagccattgtttctgaacaccctcttgtgcaccagctgaggaatcaaatgtctcttgttaaacacttagggattcagcagattaaaactttgaaacatcaaacgaaaggctgaagggatagcctcaaaggatgtggcagtttcctaggattacatggatgccctacaaacacaccgtgaaacggccgctgccctcaaacagat

SEQ ID NO: 96482 - DNA, 599 bp, Chicken  19866894917791_1
  misc_feature (1)..(9): n is any nucleotide
nnnnnnnnngtgctgccctctagacagacaggtgatgtagtggtaagtaattgcattgtgctttgctaagtaccaagggaatacaattgaagtgagaatttggaatcatgacgaacgtagcacttaaatatgaaaagtgctatggagtgttttatcccctggttttgaaagggacttcagaggtacctttcctgtgctgcagtcaactgattatttgtcttaatttcacagagcataagacagaaaagtgaacgtttggaattcagtacttcagctctgaaagctgttaatgactttcartggagttgtcatcaagcagggtagtgtactaagggaatactgtaggaacaataataaacagcaagcatctgatttggaattcctctatcttatcaaattagtttcataacactgctcatggagaagaataaatgcccagaaaacactggttgtgttcaggctgcagggttagatgtgagcgtctatcctgatgtgcatttttggtgattaaaaccaaaccaatcagtcttcatggtgcagtctaattctggctgtacttatgctacaatttaagttgcacagcaaactgtgtgaaattc

SEQ ID NO: 96483 - DNA, 417 bp, Chicken  19866894917814_1
tacaaatctttgtcacttctacagagcgcttaaaaaaggaggagaagacacgtcaggaattagaaaaagctaagagaaaactggatggtgaaacaacagatctacaggaccaaatagctgagctgcaggcccagattgaagagctgaagatccagctggccaagaaggaggaagagctgcaggctgctcttgcaaggtcagagcacagtggggttgatgagtatggagggatggtaggaagctgctttccaagactgcttttgggttaactgtaagtatattgggctaggagtgttagcrcagaaaccaattcacgtttgtcagagggaatctgtagatgtcagcatgctgtgagcagggatggccaaaccaggatgcagtgttttatctgtgtccttggtctacaaagctgcaagg

SEQ ID NO: 96484 - DNA, 599 bp, Chicken  19866894917976_1
  misc_feature (1)..(4): n is any nucleotide
nnnntctttgcttgcctttccagttgcttagcgtgaaactgcagcctgtggagcctgctgagtgtatgggaggtgctgcgaatgagcatctgcccgtccccttgcagtttgacccagagctttattgttgtgtcacatgagacttcatctccccgtgcaccttcaaaagtggggtctgggagagaggaatgccagcagaagtgtgaggggctgcccagctgttacttcgcttgctcttagctcaaaaggcccatgactcagcccttatctggaagggataaggatcagggagtgcttccyctaaagcaagcagtatttgctgacttcttctggggggaggagggggggaagcagatgcatgagcatatcacttattaattttaaaattgctcttggctctctacctcctccatatcagcccttgcattgtcagtaaattatattggatttgcaattaaaagccagctgtgccagtgaagtaccagccaaatgccaaccttaatcgtctcctaggcttccaaggagaggtgtggagcacagaactcttccttcagtgagcacttctctcgcttcaagaggacaagataagagtttaaaat

SEQ ID NO: 96485 - DNA, 600 bp, Chicken  19866894918132_1
actcatttattcaaggcaggcagcatatgtcattactgtattttactgtatgtgaattcctaaaaaaaataactctacctgtctttgcatgcaagaaaattgctatgtaaatgtgcatggttaggatttttatagatgttttcacatctctttgagcattgtttgaatatggctgaatataaggactaagtacagtgccgtatctttgtgcaagtaagtgaaagaaatgcacagacatgcctatgttgatcattatacacctctgttaccagaaaatctgcagagattactttccacatwcttctttgacagtaaatcctgcactggagagagctctgctgcggcttttctcacatgtcaaaagtattctacatctctactataagccatccaaaccgatgttattgatgtctgttgagttttctggttctcttcagttctgtctagcctttaaaaagatgcctttaagttctagttgcagaaactggaggatttacaagaggatttttttttcttgtatgtttgcatcacttgtattgtgtaacagtcatggcattcaatggcctatcataacatagcataagtaagtgaagagaaggg

SEQ ID NO: 96486 - DNA, 600 bp, Chicken  19866894918291_1
cattaacccgcgctgaaggtgatgagcatgtaggaatccaggcatgcagagctgcacagggggaggtgggaggtcagatctcatttccaccagaggctgtcgggaccagggagtgggaatttaggctggaggaatttgctaaatggtttctccacgaccatcagcgcctcctaggtgttccagtcatcctttaggtagggctgagggcagcttattgccctgcaaatccctgaccactgctctgaagaatccagtgctggtgggtctaagcagatgccagatcacagtctggtggtgtcyctggctctgctttgcataccagtgctcagggatgtttgggaygtggggcctggagtcccacagttttgggatttaccggaggcrgtgaggagggcagctgagaacctcggaaacaagaaatgacacccgcaaaagcttctcccacagtgtagctctgatgcaggggggctcacaccctacaagagggtctccatgaccccagtgatggctgcgtgcttgtgaaaaatgaccatttttcttataagcgccccaaaacgcctgcagtttatggcactgttctgatattacagactcgtgctt

SEQ ID NO: 96487 - DNA, 600 bp, Chicken  19866894918291_2
catgcagagctgcacagggggaggtgggaggtcagatctcatttccaccagaggctgtcgggaccagggagtgggaatttaggctggaggaatttgctaaatggtttctccacgaccatcagcgcctcctaggtgttccagtcatcctttaggtagggctgagggcagcttattgccctgcaaatccctgaccactgctctgaagaatccagtgctggtgggtctaagcagatgccagatcacagtctggtggtgtcyctggctctgctttgcataccagtgctcagggatgtttgggaygtggggcctggagtcccacagttttgggatttaccggaggcrgtgaggagggcagctgagaacctcggaaacaagaaatgacacccgcaaaagcttctcccacagtgtagctctgatgcaggggggctcacaccctacaagagggtctccatgaccccagtgatggctgcgtgcttgtgaaaaatgaccatttttcttataagcgccccaaaacgcctgcagtttatggcactgttctgatattacagactcgtgctttggccctgcaaagcatcacgaggtggcttaaaaaaatcaaga

SEQ ID NO: 96488 - DNA, 574 bp, Chicken  19866894918291_3
ttccaccagaggctgtcgggaccagggagtgggaatttaggctggaggaatttgctaaatggtttctccacgaccatcagcgcctcctaggtgttccagtcatcctttaggtagggctgagggcagcttattgccctgcaaatccctgaccactgctctgaagaatccagtgctggtgggtctaagcagatgccagatcacagtctggtggtgtcyctggctctgctttgcataccagtgctcagggatgtttgggaygtggggcctggagtcccacagttttgggatttaccggaggcrgtgaggagggcagctgagaacctcggaaacaagaaatgacacccgcaaaagcttctcccacagtgtagctctgatgcaggggggctcacaccctacaagagggtctccatgaccccagtgatggctgcgtgcttgtgaaaaatgaccatttttcttataagcgccccaaaacgcctgcagtttatggcactgttctgatattacagactcgtgctttggccctgcaaagcatcacgaggtggcttaaaaaaatcaagatgcagctcacagcaga

SEQ ID NO: 96489 - DNA, 600 bp, Chicken  19866894918363_1
ccgatggatgctggcatgttccttgctgcctttgaaatatgagttagtaacaacttggattctctcatctaatggatcctcaaatcttttccattccacttaataaatgatatatatatattttttcatttagtctactcgagctgatgatactttgcattgtcttgttttaaatacagttccagtcacttgaaggatttcttcctttttataacagtctcctttaccttgctacagtgaattcagcttcgttttacattttcactgtcatttccatatgtgttgagcagtaatgctgtsattccagtatagtattctccagcagtttacatgcctctttccttaaactatcctgctcaggtgtgtcgttaataagcttcctcacattatctaagattctcactraggtggttaatttgttcactttatttgattctgatttcttgaaaatacagatacttggcactgggcacaatttattctatttcatgtatattttctgtcttaatattacagtgttccactgattatcttctccccagaagtctgttatgccttctttttggtgtgtgtaagggaggacattcctgttccccccat

SEQ ID NO: 96490 - DNA, 600 bp, Chicken  19866894918363_2
aatgatatatatatattttttcatttagtctactcgagctgatgatactttgcattgtcttgttttaaatacagttccagtcacttgaaggatttcttcctttttataacagtctcctttaccttgctacagtgaattcagcttcgttttacattttcactgtcatttccatatgtgttgagcagtaatgctgtsattccagtatagtattctccagcagtttacatgcctctttccttaaactatcctgctcaggtgtgtcgttaataagcttcctcacattatctaagattctcactraggtggttaatttgttcactttatttgattctgatttcttgaaaatacagatacttggcactgggcacaatttattctatttcatgtatattttctgtcttaatattacagtgttccactgattatcttctccccagaagtctgttatgccttctttttggtgtgtgtaagggaggacattcctgttccccccatcttatttttgaatcttctggcatttatatatgtgcctgtctgttgttcccactttgggaagtcatttatgtaacacacatgtaataattacatcctttaactcat

SEQ ID NO: 96491 - DNA, 536 bp, Chicken  19866894918782_1
tcacacatgagatattaatattcatcattatgaaattgctgcagttttaggtaattaagtgtttgatcatccttgattatcagcctgaacagcagtggaaattgtgaaatgtatgtagttcaatgattcatgtttgactaccctttctgtggctggacccaaattatctactagagtattctgctgctgatctatttcagagcctgcagaagtgtttgtttgcatggaaagtgtaagatttggaattaaaactgtgtcatttttatatccttgaccctgcacaacactgaggcttgcagmtgaaaagggaaaccagcaagtattcccaagtcctttgggaatggaaagatcctttggtgcatgagaacattgtttgtattataatacaaaatgtatagatagaaatgaaaaacaacaagtatgccttttacaaaatattattctgagtcaatgtatatacattatagacatggcactttacatgtcacgtatgtctccaagcacaattcaagctgtctttctgtattattcctgtg

SEQ ID NO: 96492 - DNA, 600 bp, Chicken  19866894918795_1
tctaacgtgagatcataacatgcctgttgtgatttatttgttacttactgcagtagcatggatatgaacgtacttccccccacccttttgttaaagaggagcttatcacgatctccaggtttagagcttaaggttttagatctcaactgtttttgtttaaactgaattagtgtacagaatatcatgaaagcactgtagattgatttggctatggaccatctccccagccagcttctccttggagacttagagaacaatctcatgcacaaaaaaaaaaaaaatacccaaagcctacttcaytccctcatgtgggaatccttaatatgagctcactgcctcttcatgggatggcacattaagatgtttgttttattttacacctccaggaaatacaatagcaatgatgaatacagacgacaaaagcccccttggataattctctaaagctgaaggctattgccccttgccatcatgcaaagactgtgtgtatgatctatggcagataagatgcatgctaaagtaattcatgtgtatgaccgctaaaacaaacttgaatcaatagtcaccattaataatgacagccaccacatggaggtgcct

SEQ ID NO: 96493 - DNA, 600 bp, Chicken  19866894918813_1
cttacctgactgtgttgtactcaatcctttttctaaactgaacaaagtgggggggggaggaaaattagaaagagaaggaataatacggttgcactgtaactcatgcaacataacttttttttcccctttaatttggccttcacgcgtttgttttttttttcaaagaacagaaggaatattttgccgtagtgtgatcacagtgaaatttactgtctcttgtcctttttatttttcccctttgtgaggaatttgaagtggggagtcgtcaacgtacgtccttaggtgtgaagtgagaaatgrgtgtctgtgctaacttgtgtcatcgtaaccctttctgatctggggcagggacagacagccttccacccaagacatggagagcccatggcgtgccagagagctcttcctgagaagaaaggaaaaggaagatgacactgattcctgaactccgaaagcgaccgtctgaatcatgtgcctcaaaagagacgttacaagtagttttcacgtttcacttgggacttaaaagtgttttttgggggctcctgctgagcagaagtagatgatagaggcgaaggagctgattatattaacttgcaagat

SEQ ID NO: 96494 - DNA, 599 bp, Chicken  19866894919216_1
  misc_feature (1)..(53): n is any nucleotide
nnnnnnnnnnnnnnnnnnnnnnnnnnnnnnnnnnnnnnnnnnnnnnnnnnnnnataagacacaagaggaagtaataattcctccatttcttaatgctctctaataaattgcatctaaaagtttaggagcacgtgttatttttttcttatcattcagaaaaggaccagcatatctcagtcaacacgcactgttgatctggggagaactagtctccaaccatcagtttctatctgtaacaattgctcaaaactttgtattccacaatgagcggttgacatggctgtttgatgttagaatacrtttcttgataatctccagtgcagcctgaggaactggtgtctgcacagctgtgttttctcagtccaatgaatttgcagggccatgttcttcataatcagaggtgtttgcttccccacatacaacctagataactctttttggaaacacttcccctaagtcttttctgagggtttccttgccacaacagaaaaggaagatgcaggaatcaaaatcaggtccatgccagcacgcctgagaagcagttgaatactggtcaggcataagacacttccattaaaactttatttctctacaaggaa

SEQ ID NO: 96495 - DNA, 554 bp, Chicken  19866894919418_1
  misc_feature (1)..(24): n is any nucleotide
nnnnnnnnnnnnnnnnnnnnnnnnttcctttgtgtcctaaaaatccttaggttttagcttcagtttagtgttaagactcattcctgtgaggagttagcagattgaaacacaccctgatgagccagcgtaaggattttgtaactttacaaatcagatttttttgtaactttacaaaaaaaaatcagatttttcctctgtcctctggaagtcactgtcccatctggctcttgttggatagctcatgcatttgtctctgctcggcaaaaattccttgctgtttctcagaggttaactcatccmtaaaatgtcccagtgtcccattcggaaaactggtgcagtgctcacatccttgcctcacctagaaccttgagatttgctacatatacatagattttgtttaagatgtttgcctttgtttccagttctcttattagtactggctggatgtctcaagaaaacaggtctgcataattccagttgccatacaaattgtgccactgggcaactgagaacacaaatactgctgtccataagagcttacagtctctccctct

SEQ ID NO: 96496 - DNA, 600 bp, Chicken  19866894919715_1
agtccaccttcccaccaggtgctcaatcactgcttcaggctgtgactcagcatttctgctacaacgtctaagttttagatagctaaacttaggtgggataaatcagtctctgatcatctttccatccaaacaacagagatatcagcacttccttgtaagtatgtgtattttgatgaaagcactgagaaatgctaggatgcactgcaatagtgaaacatgaaagaatctggagagatgaggcaacagatctgcaactgtaagagttgaaaaaagagcttgacaaaaatacccaaaaattcwttctgaggtggggaaacagtcgatttttttggaaaaattcagagctggcagcaataggaaaactgcattatgttgccattaaaacctttttcttatattccttccaattttcttagtttcagtaacatgaaagattttgttttggagtcgtgtctcacttcatctgtcagtttttccatcccctaaacaaaacccttttaaagacaagtaggtatatacagcttttcaacaaattccaaaattaatttcgtgttgaaacgagaaatcaaaatgtttccttccagaaagattaaaatggaa

SEQ ID NO: 96497 - DNA, 600 bp, Chicken  19866894919879_1
aaaatgaaatgcctgttgagactatgattttcagaaattgttctcattatcagctttattggtttactgtggagtttggtctctgcaagcaaaatggatccatcaaagcttacggggcaggactgctttcatcttatggggagcttatggtatgtgtcatctatatggtatcaaaagattgctgcaatgcagttttctaaactcactggtaaaagcaagatatttcctcacataagacaatattctttaagatactgatttttcttttctgaagaaattcattcttcctcacaagaagcwggtgagtagaggataaactactgtaggattgtacaagttttcaaccttgagagattaaatgtgaaraaaggaaacaacctataaagtatctgttttgcatattatttctgcccagtggtgatgcaactgacttgaacataaaactcatgtacttttctagactatacgctagagggcaatattatgcctatttatgaactcagctgcacacttgaccttcatgcgcacgtaaatctgatgtgaccaaacgaagtgccaaaaactgtaaataagatggacaatagcaaatagaaaatgctt

SEQ ID NO: 96498 - DNA, 600 bp, Chicken  19866894919879_2
ctgtggagtttggtctctgcaagcaaaatggatccatcaaagcttacggggcaggactgctttcatcttatggggagcttatggtatgtgtcatctatatggtatcaaaagattgctgcaatgcagttttctaaactcactggtaaaagcaagatatttcctcacataagacaatattctttaagatactgatttttcttttctgaagaaattcattcttcctcacaagaagcwggtgagtagaggataaactactgtaggattgtacaagttttcaaccttgagagattaaatgtgaaraaaggaaacaacctataaagtatctgttttgcatattatttctgcccagtggtgatgcaactgacttgaacataaaactcatgtacttttctagactatacgctagagggcaatattatgcctatttatgaactcagctgcacacttgaccttcatgcgcacgtaaatctgatgtgaccaaacgaagtgccaaaaactgtaaataagatggacaatagcaaatagaaaatgctttagaaatgttacattcataaatgtatttcagaactacttttaccttaaattttatgcagattaaaa

SEQ ID NO: 96499 - DNA, 600 bp, Chicken  19866894920041_1
tgaagatgtgatagaaatacatactcccacgctttccctgattatacactaaggtcacatgcaggtcttcaaactggatgaacaaattagcactgctactgtctaaatacatcccaggcccaattttacacaatggaaaatgtgaggttatagcacattataaacaataatatttctattaatatttttacaaactacttttgtaacactgagactaatttagtaaacaaggagaagcctttcaaatatcatggaggattagaatgatactgcaaaatctgtatcttctcactgatttarctctcttctatattatggtaaatgagtrgagtaagaaacttcataataaaaaagaaaataaaaaagtagccttctttcagtctgtttgagacagaaacaaggccagcttctcaggaatgtttctagtgagttgtgttcaagtgacagtgatttacatttgtagtgcctgcatcttacaattccaaaaataatcataaatttaaaactgagtttaagtggtcgtgtcatcttctgaaacaccatcatttttttcaatattactaacctctctgctcacatgcaaaaacagtcagttgcata

SEQ ID NO: 96500 - DNA, 588 bp, Chicken  19866894920041_2
acgctttccctgattatacactaaggtcacatgcaggtcttcaaactggatgaacaaattagcactgctactgtctaaatacatcccaggcccaattttacacaatggaaaatgtgaggttatagcacattataaacaataatatttctattaatatttttacaaactacttttgtaacactgagactaatttagtaaacaaggagaagcctttcaaatatcatggaggattagaatgatactgcaaaatctgtatcttctcactgatttarctctcttctatattatggtaaatgagtrgagtaagaaacttcataataaaaaagaaaataaaaaagtagccttctttcagtctgtttgagacagaaacaaggccagcttctcaggaatgtttctagtgagttgtgttcaagtgacagtgatttacatttgtagtgcctgcatcttacaattccaaaaataatcataaatttaaaactgagtttaagtggtcgtgtcatcttctgaaacaccatcatttttttcaatattactaacctctctgctcacatgcaaaaacagtcagttgcatatgtggactgaaataca

SEQ ID NO: 96501 - DNA, 599 bp, Chicken  19866894920138_1
  misc_feature (1)..(228): n is any nucleotide
nnnnnnnnnnnnnnnnnnnnnnnnnnnnnnnnnnnnnnnnnnnnnnnnnnnnnnnnnnnnnnnnnnnnnnnnnnnnnnnnnnnnnnnnnnnnnnnnnnnnnnnnnnnnnnnnnnnnnnnnnnnnnnnnnnnnnnnnnnnnnnnnnnnnnnnnnnnnnnnnnnnnnnnnnnnnnnnnnnnnnnnnnnnnnnnnnnnnnnnnnnnnnnnnnnnnnnnnnnnnnnnnnnnnactcctactgggccgcactcccagtaccccaggccatccaaaaacttcacttatggtatctttttcataagygtatgtatgccagccaaacccaagtactaaagagacagggagatggtccctatatgagaggctgctgggaagaggtgatgaccaaagcctaagttttctctctgtcctcacacaatggggaaatggcaacataacatgcacttatccacgttacagcttgcacaaagctcagctcttgctgaggtgcaagggagggatgtgcagtttaagaatggaatgcaagccagactcctactgaaagctggggcctcagctgtccaccaagcccagttcaaacactgcagcaagccagtgtgtgg

SEQ ID NO: 96502 - DNA, 517 bp, Chicken  19866894920138_2
aagccagactcctactgaaagctggggcctcagctgtccaccaagcccagttcaaacactgcagcaagccagtgtgtggatccaccaggaaaagggcaggactcttcctggaggatggggccagcaaactggctaacccctcaagctgaccaacccacctttgcctcctcgatcatctggttggcgatgccttcaaccttcttgatttcctgcgtggacagggctcccttggctgtgaagtcaaacctcagcctgtctggtgccaccagcgaccctctctggtctgcttctcccagcacygagcgcaggggcgaagttgaggatgtgggtggccgtgtggttgctcatgaccggtctccgcctggtctgatggagaaaggctttgttagatggggtcccacgccgcacagccaggatcacttccagctgtggagggagaggctaacgtgctgcttcaccaaaagcaacttgctgccttggagcctcagctataggagcaggacattcccctgcacat

SEQ ID NO: 96503 - DNA, 599 bp, Chicken  19866894920207_1
  misc_feature (1)..(85): n is any nucleotide
nnnnnnnnnnnnnnnnnnnnnnnnnnnnnnnnnnnnnnnnnnnnnnnnnnnnnnnnnnnnnnnnnnnnnnnnnnnnnnnnnnnnntatggggtgaggaaaatggcaaatcagtcatgatttgctatgtgggaagtgggttgttgaacatactgtttctgaccacatggcctctggaccatctctgcctgcttctgtgtgggagatgtgcctcccctggtaaccacaaccctcggaagtaacaggttatgctgttctcactgctctaattgcagctcccatctctgcaattacagttgctrtagatcgataacaaattgatgagctagagccttycctgaggctactgcacagagcaagtggcagggaatggagcagggtattttccagctttcagttcactatctcctctcaagtcagggtcagcaataagacagcttgcaggtctgaccatgcttgagatcatgagaaagaggagatgaaggaaggaggtggagcacaggtcacttcctcctgaggtcaggctgatactggccgtgtatttacatagggatgggatcatgtttaggatggggtacttgwgctctctgcctttcccttc

SEQ ID NO: 96504 - DNA, 599 bp, Chicken  19866894920207_2
  misc_feature (1)..(51): n is any nucleotide
nnnnnnnnnnnnnnnnnnnnnnnnnnnnnnnnnnnnnnnnnnnnnnnnnnntatggggtgaggaaaatggcaaatcagtcatgatttgctatgtgggaagtgggttgttgaacatactgtttctgaccacatggcctctggaccatctctgcctgcttctgtgtgggagatgtgcctcccctggtaaccacaaccctcggaagtaacaggttatgctgttctcactgctctaattgcagctcccatctctgcaattacagttgctrtagatcgataacaaattgatgagctagagccttycctgaggctactgcacagagcaagtggcagggaatggagcagggtattttccagctttcagttcactatctcctctcaagtcagggtcagcaataagacagcttgcaggtctgaccatgcttgagatcatgagaaagaggagatgaaggaaggaggtggagcacaggtcacttcctcctgaggtcaggctgatactggccgtgtatttacatagggatgggatcatgtttaggatggggtacttgwgctctctgcctttcccttctccaaaccatgtcagagctgtctcactacagcta

SEQ ID NO: 96505 - DNA, 600 bp, Chicken  19866894920207_3
ctctgcaattacagttgctrtagatcgataacaaattgatgagctagagccttycctgaggctactgcacagagcaagtggcagggaatggagcagggtattttccagctttcagttcactatctcctctcaagtcagggtcagcaataagacagcttgcaggtctgaccatgcttgagatcatgagaaagaggagatgaaggaaggaggtggagcacaggtcacttcctcctgaggtcaggctgatactggccgtgtatttacatagggatgggatcatgtttaggatggggtacttgwgctctctgcctttcccttctccaaaccatgtcagagctgtctcactacagctaaatgtgctgtgaaaaggacagttctttgagagaatagtcctttctgtagacaagagtgaatgaaagaaataaatgacatttttgccctttaacatagcacctagacccacacactggccaatcttctaagctggataagctattttactaaccacagaatcatagaattgtctgagttggaaatgatttttaaagctcatctagtccaactcccctgcaatgaacagggttacctacagttagagca

SEQ ID NO: 96506 - DNA, 600 bp, Chicken  19866894920209_1
aaatgtatttcccattcaatgaaatgttgttattagactgcatgcattttaatagagctgtgtcagttcagttaacgtaaggacaagaaatcttaaattatattctaatttttggtgtgtagtatgatgtataaagcagggtaattccaggccacagatgtggtttggctggtggcttctggtaactggacagaagtgtgagccagcctatctatctatgtgtaagagttccttcttgtgtacagttttagcattttatccaaatgaagctcttgccttagtatccagtatgtaggctcrtttattccagtttcaactaagttattgattctctgcttggtaccacttaaataagttaaagatgatatagcacattatagaagggttttataccagagttcctcttttctttgtaggtttctttaatgggagagtgggaaagagttatcccacgtaggaactgaagcatcttgtgctaggaaaacataagactttcttttctgggggggggggggggggaaggatatctgcagtgtgagcagtgaggttttcatagaatcatagaataattaggactgggaaagacctctaagatccccc

SEQ ID NO: 96507 - DNA, 448 bp, Chicken  19866894920244_1
agaactgcggggctgatggcttcttccaggtccctggcacgcttctgggagtggggcaagaatatcgtctgcgtggggcgcaactatgccgagcacgccaaggagatggggaacgcgctgccggccgagcccctcttcttcctcaagccctcttcggcttacctgcgggaaggctcgcccatcctacggccctactactgcagcgacctgcaccacgaagtggagctgggggtggtgatcgggaagagaacccaggccgtgtcccaggaggcagctatggagcacgtgggcggctatgcyctgtgcctggacatgaccgctagggacacgcagaaagagtgcaaraagaagggtttgccctggaccttggccaaggcattcagcacatcgtgcccggtcagtgaatttgtgcccaaggagaagatcccagaccctcacaagctgaaga

SEQ ID NO: 96508 - DNA, 403 bp, Chicken  19866894920244_2
tgggagtggggcaagaatatcgtctgcgtggggcgcaactatgccgagcacgccaaggagatggggaacgcgctgccggccgagcccctcttcttcctcaagccctcttcggcttacctgcgggaaggctcgcccatcctacggccctactactgcagcgacctgcaccacgaagtggagctgggggtggtgatcgggaagagaacccaggccgtgtcccaggaggcagctatggagcacgtgggcggctatgcyctgtgcctggacatgaccgctagggacacgcagaaagagtgcaaraagaagggtttgccctggaccttggccaaggcattcagcacatcgtgcccggtcagtgaatttgtgcccaaggagaagatcccagaccctcacaagctgaaga

SEQ ID NO: 96509 - DNA, 599 bp, Chicken  19866894920350_1
  misc_feature (1)..(152): n is any nucleotide
nnnnnnnnnnnnnnnnnnnnnnnnnnnnnnnnnnnnnnnnnnnnnnnnnnnnnnnnnnnnnnnnnnnnnnnnnnnnnnnnnnnnnnnnnnnnnnnnnnnnnnnnnnnnnnnnnnnnnnnnnnnnnnnnnnnnnnnnnnnnnnnnnnnnnnnncaacctatcaccaccatgctcactaaaacatctccccaggtgtcatatcatagaatcacagaattactcaggttggaaaggacctcaaagatcatcaagtccaagcacagcctaatcatatgccctcttcttgaaaacctccagggasggtgacctcagtgtytccctggacagcttgctccaatacttcatcactctttctgattagaaattttacaaaatattcaacatgagcctctcgtggcacaacttcaggccactacctcttgtcctatcatggttacccgggaaaaagagaccaaccctcacctcattacctcctccttttaggcagttgtggagggcaacaagctctcccctgagcctcctcttctccagactaactaatcctagttcccttagctgctcctcctaagatgtgttccaagtgattgaccaaccccagct

SEQ ID NO: 96510 - DNA, 599 bp, Chicken  19866894920350_2
  misc_feature (1)..(137): n is any nucleotide
nnnnnnnnnnnnnnnnnnnnnnnnnnnnnnnnnnnnnnnnnnnnnnnnnnnnnnnnnnnnnnnnnnnnnnnnnnnnnnnnnnnnnnnnnnnnnnnnnnnnnnnnnnnnnnnnnnnnnnnnnnnnnnnnnnnnnnnnncaacctatcaccaccatgctcactaaaacatctccccaggtgtcatatcatagaatcacagaattactcaggttggaaaggacctcaaagatcatcaagtccaagcacagcctaatcatatgccctcttcttgaaaacctccagggasggtgacctcagtgtytccctggacagcttgctccaatacttcatcactctttctgattagaaattttacaaaatattcaacatgagcctctcgtggcacaacttcaggccactacctcttgtcctatcatggttacccgggaaaaagagaccaaccctcacctcattacctcctccttttaggcagttgtggagggcaacaagctctcccctgagcctcctcttctccagactaactaatcctagttcccttagctgctcctcctaagatgtgttccaagtgattgaccaaccccagctaaagacaccaagaca

SEQ ID NO: 96511 - DNA, 600 bp, Chicken  19866894920350_3
ctacctcttgtcctatcatggttacccgggaaaaagagaccaaccctcacctcattacctcctccttttaggcagttgtggagggcaacaagctctcccctgagcctcctcttctccagactaactaatcctagttcccttagctgctcctcctaagatgtgttccaagtgattgaccaaccccagctaaagacaccaagacatctaataactgaccgacaaacattttcaaataaattctcaccccagaaaaggttgtccctccacaagttaggcagaagtaactgtacaaaaaaagcytcatctctatactcagccaattccagatgacatggcagagtaacacagctggaactggcatgacttaacaggcactggggacacagtccacatcccccttagtaaaccacccttggcctgaatatgcgaaaggaactttctatttccataatctaaggagccatgaggagataaaaataaccactttgtttgtcctattgaatagggggattaaaataaactggcaacgttttaagtcatgcaccagaggtggattcaccaggtcacaattgcaaaaggagaactgccaggccttgataa

SEQ ID NO: 96512 - DNA, 600 bp, Chicken  19866894920381_1
aactcagtgacatgaggggtaaaatggaatggttaagagtggaaaggatggaggaaaatggccactgtgaaggagaattaaacccacttgaagtgttcccacccacacccaggctcctggctcctgctctgctaaactgcttctttggaaaaagagtcagtcagagtacattcctcctcaagcccagtgcacatgtgttataaaaatgtagagcagcaggtaaatcattcatggagacagggaaataaataaccctttatgcccatataaatactgatcagatgttcataagggaaattwacatggggttttattcagtactgtcagccattcctctgtcttccatcattcctgctgtgaagacaattcaaaatatggcggtggagagtgcagcctctcctccaattgatccacagcacattgtgtagaaagctctgaacttgccctcagagctgctgttatttttattgtggcttttagccgggtgagatcattcttcctggtttgcctcccaagaaataatgggaagcagtatgtttagtcagtggattgattcagtgatctattagtctaatcctgactctgccaatcatctactag

SEQ ID NO: 96513 - DNA, 599 bp, Chicken  19866894920730_1
  misc_feature (1)..(39): n is any nucleotide
nnnnnnnnnnnnnnnnnnnnnnnnnnnnnnnnnnnnnnnctggggcttaaggggaggagggagcaagacaaaactaggctttctgttcttacataagcaggtcgggggctgagcaaagctgtgaggtttgcgttgaatgcaagaatcccaaaatcaaatgtggatttggcgactttggtgcactttggaaatgcctacacccatccatgcctatcacaaggcaagtctgaatgagaagctgtgtactttgagatgaatgggtgtgagcagaaaagcaaagcagggtttgtccagctcacrtgcagggaacagaccatgtaagatgcctacaacagtaggtatgggactaaaagcaccagccagccaactgactcccagggcctcctcccaagggacagcactacagacaacagatttctggccagaccgttggattcaagtcataaaggataaaaaaaaatgggagaaataatgagcaaatgtatttattttgcacagttctacactgtaatcagcgcttctgaaaatgaccgcagtggaaaaagaacacgtttcttttacttacaaaaacatccagcaattcgtatctgatcatctgc

SEQ ID NO: 96514 - DNA, 599 bp, Chicken  19866894920755_1
  misc_feature (1)..(169): n is any nucleotide
nnnnnnnnnnnnnnnnnnnnnnnnnnnnnnnnnnnnnnnnnnnnnnnnnnnnnnnnnnnnnnnnnnnnnnnnnnnnnnnnnnnnnnnnnnnnnnnnnnnnnnnnnnnnnnnnnnnnnnnnnnnnnnnnnnnnnnnnnnnnnnnnnnnnnnnnnnnnnnnnnnnnnnnnntattttagagtccatttagagtgaattcgagaaaactaatcgaataattctaaattctgaactgtgtgaaaatgccaaatttagagcaaatccaggtatacgcttttagagtacttccctccacaaaacayattcattaattttgcagtcactagaatgttttgataagcaaataacaaaatatgatttagtttgaaaaatcttaatagtatgtgctaaattaatgctggcaatgcattaagtatatcttaaccactctttcaagaatggtatttagcaaatctacacacagagcctaaatgcgagacactgattaccattttttaatcaaagactgccagttttaagtttgcacatcagtgcacagaattgcattgcagatttcaaccactgaggtatgggttacccaaatgttagagcaaaacacttt

SEQ ID NO: 96515 - DNA, 599 bp, Chicken  19866894921035_1
  misc_feature (1)..(123): n is any nucleotide
nnnnnnnnnnnnnnnnnnnnnnnnnnnnnnnnnnnnnnnnnnnnnnnnnnnnnnnnnnnnnnnnnnnnnnnnnnnnnnnnnnnnnnnnnnnnnnnnnnnnnnnnnnnnnnnnnnnnnnnnnnnatacattgttcacccgtggccaagtgttaatgattgctttgatttcagtcagcattttgagaagacttaagtgttcaaaagaatgtacaaactcaaggtctgctggaccttacccaaagctcattgaaattgctgggactccactctcagccagccttggagcccagctctttggaytcctcagcttttctgcgttggcttctgttctgaggctgcaggatttttaacaaggcttggtcaaatagataaagaatatcatagatctcatagagcttgcagtgctggaaggaacgaagcacattgtatgggacagaagttctttttctcaaagccatttatcttttatttatctgaaaattatgaattcttgctattttctcagtaaatgttggaaaatagctagaattaaatgagtaaaattaacagtaataaagttagagaagcatgaaattaaaaaagtgattgcagtaataagg

SEQ ID NO: 96516 - DNA, 600 bp, Chicken  19866894921331_1
atgcaagatttattcagggctctccttcagaagatattgacccacagtgcttacctccactaatttgaacaaaacttggaagagcgtggcagggaagcacacttccaatagaatacagtgtgcagaacaggaactggaactatggtttggtctgctaagaaactgtttaaccttaaataagccacacattcagtcctcaatttcccaagagattttcagggtccaagaatgtgtttctcaatacgccacatatgtcaaacattcagtaatgttgatagaaactagaaggactagcttctktcatgacctaatctaactcttcatattaaactttgacaatagtatctaatttctgatagcagtgtatcttatatttatcataaacttctatccttactgarttgaataaccatgcaaagaaacttaagtacagggcttctttttgttgtggcactgaggtggtaaaaacatagaagacatcaaagggacaagacagaaaccacagacaaagaggcattagaatgtttaggtgttgttatagaaagaatagacgttttgatttatttctgctgtagaaagagatcttcatggaaaaccaag

SEQ ID NO: 96517 - DNA, 600 bp, Chicken  19866894921331_2
cttccaatagaatacagtgtgcagaacaggaactggaactatggtttggtctgctaagaaactgtttaaccttaaataagccacacattcagtcctcaatttcccaagagattttcagggtccaagaatgtgtttctcaatacgccacatatgtcaaacattcagtaatgttgatagaaactagaaggactagcttctktcatgacctaatctaactcttcatattaaactttgacaatagtatctaatttctgatagcagtgtatcttatatttatcataaacttctatccttactgarttgaataaccatgcaaagaaacttaagtacagggcttctttttgttgtggcactgaggtggtaaaaacatagaagacatcaaagggacaagacagaaaccacagacaaagaggcattagaatgtttaggtgttgttatagaaagaatagacgttttgatttatttctgctgtagaaagagatcttcatggaaaaccaagtcaataaccattgggcaaaattttaaaggataggcttttagatttggaatacaaatatccaagaaagccatgtttgtcatatacacttaatattcaaaata

SEQ ID NO: 96518 - DNA, 599 bp, Chicken  19866894921359_1
  misc_feature (1)..(23): n is any nucleotide
nnnnnnnnnnnnnnnnnnnnnnnctactcctgatatactttagtgtagtaaaaatgtttgcgaagattgacatcatcactatcttcgactatctctgaggtttacgggttgctgctttatcttggtggtagccctttgaaacctaagtataaacacgtatacaaatctgagcacctgctggaagtctctcattcaaggcggaaactgaaaatgtctatctttacagttaatcagtgattaatgcttcctgaagaatttgaactctttataatgctctcatatctggaataaaaggatgcygcctttatgaaacaagatctgctaagtctttacagatagaatcataagtgcagaagtacagaaggcatattctgaagaactatgatgctctcttgcacgagagaaggaacgtactctacttcttggctgcagatctgtggaagggaacaacctggtcagaagggtgatggtgaaacatatgagtgccaaggctggtagatagaagctttggagagagagtgaaatgcagctgattcaaaattaacaaatggaaacttagagagctcttctgtataagtgttactctttgacttgttaaa

SEQ ID NO: 96519 - DNA, 562 bp, Chicken  19866894921535_1
agttttattcttgccttgctgaacaggggtcagagtggtaaatgcaatataagtgctcacctttaagcacatgcccagtttcactggttattatttatagctaacctttcgaagtaatgactgcatgctgtacgttaaaaaaacagaatcctgtattattatggagtattttccctttatgcaaatattacattaacacttcaccagtcaggaaagataatccacttagaaatatcattattattaaagcgcattcaatcaatatgcaaatgtgaaaaacagtaattaagcttttttttwaaacaattgcgcatcactaaaaataaagataccaagttgtactaaatgatttcacatttttacaacctattctccacttgatataggtgaccgcatgatttatccacatttttcaatatgaaagtccatgatcgaaggatcataaaatcattggagctggaagagacctttaaaatttacctagtccaactcctctgcaatgaacaggaacacctaccactcaaaaagggctgctcagaacctggtccagcctgactctgaa

SEQ ID NO: 96520 - DNA, 600 bp, Chicken  19866894921557_1
ttccttagaatcaaattgcataagtaaatctggttgcaaatcagttatttgagttaccgaatggggcagatttgatcctctcaggacttctagtagtctactgattatttttcagttcagctgaacagtcaccatctgcaacaagaaatagcagatggaatttcttcccctctcccagctgggtggggcaatactttatcctgacataggctccgttatctcctgcccttggggctgaaaactgtagcccagtttttcagctgacttacactaatgtgccatcttatccaataaggcaaygatgccattttatacttgttacaaaatcracacacgtccccaaatgtgatgacacctttccactgacttcaatggcttttggatatggccctcacgatacaggctacatggattattatttcttcacaatacccagaacagcaaagtatgttaaaatcttctgttaatgctttactgaggaaagaagcataataatacattgaatgccatatattaaataaaatctctgtcctgtttcagcaggaacctgaggttttacacctaaaacacatacaggtgttcagatgtggaggccagaag

SEQ ID NO: 96521 - DNA, 600 bp, Chicken  19866894921557_2
ctggttgcaaatcagttatttgagttaccgaatggggcagatttgatcctctcaggacttctagtagtctactgattatttttcagttcagctgaacagtcaccatctgcaacaagaaatagcagatggaatttcttcccctctcccagctgggtggggcaatactttatcctgacataggctccgttatctcctgcccttggggctgaaaactgtagcccagtttttcagctgacttacactaatgtgccatcttatccaataaggcaaygatgccattttatacttgttacaaaatcracacacgtccccaaatgtgatgacacctttccactgacttcaatggcttttggatatggccctcacgatacaggctacatggattattatttcttcacaatacccagaacagcaaagtatgttaaaatcttctgttaatgctttactgaggaaagaagcataataatacattgaatgccatatattaaataaaatctctgtcctgtttcagcaggaacctgaggttttacacctaaaacacatacaggtgttcagatgtggaggccagaagaactggccctcagctgcagaaatgcgaga

SEQ ID NO: 96522 - DNA, 543 bp, Chicken  19866894921659_1
cggttcgagtccatccaagctttgcatgtttctatgacttaatgtttcttttctgaaaggcataattttgacatagtaaacaattctgtttctcctttctcattactcacactcttctttctgcttttataatacattgaactcttacctaccacatgtatcatttagaaggtagttctggaatgcattattttatatctgtataatggaaaaactggaaatgaccaagatgaagttaatcatttccatttctcacttaggcaaaatgttttttttttttttttttttcacttctcctcrcaaaagcaacatcattttgccagtagaaaacagaaaagaattgtaagctccctttgttcttgagcagtgatttttatcatgttctagccttagcattgatggattcttcacagaaaaaaagggagtcatgcagctataatttcttatttcttaaacaaaatacaatccttgatcaaacaatttgctctttgatcttatcccttgcagaaggttggaacaaataacaggcgtttgcctctgcat

SEQ ID NO: 96523 - DNA, 426 bp, Chicken  19866894937335_1
aacctgtacctacagtgtcaaaaactgaattaaagcaagaacaagcatttcaagtagaaaaaaaaaaatggaaagcctgtaattcctggattatctgtcatatgttaaaggattatatatattgatatatatattttttttaaataagacaaaacacccttcctgcctcccaaagaaaatggaagaagcagccacagctaattagtagtaggaagtaccaatctactgcaatttaaactccaggtaacaagatacttatttataagtattttgttttccccactaaatccattgcgccaygcggttagtgggcatggtggggatgggttggtggttggacaggatgatcctcttggtcttttccaaccttaatgattctatgatttttaaaactttaggaaagtgaaaaagttgctgcttccgagc

SEQ ID NO: 96524 - DNA, 599 bp, Chicken  19866894937509_1
  misc_feature (1)..(61): n is any nucleotide
nnnnnnnnnnnnnnnnnnnnnnnnnnnnnnnnnnnnnnnnnnnnnnnnnnnnnnnnnnnnnagtgctctctgggacacagattttttcttttttttttttgtggaggatattgaaagatgagctattattatataaccttcaattaacagagtctgtaggggactcttcaattttaaagccttcttgtgaagatgaagagaaacatctctatacaagactgcaggatgatacttctttctctggctgttctttccatttccaaagagattattaatgaatagacctgtggattatttcayattggaagatttctaggatgagaggagtgaagaagtagtaaggatttatgggtagcaactatttggaaccatgagcagccttctgacaaggcagaattgcagtgaattaattcctctcatacaccctgcctatcatctactatatactcattctggtttttggtcagattttgggatatattgataagacttttctgaatataggtaaagaagaawttctgaatagacagtgaaaaacaaaaggtactctggctaatttttggtgcattccacccagttactctgtagataactttgta

SEQ ID NO: 96525 - DNA, 462 bp, Chicken  19866894937509_2
gactgcaggatgatacttctttctctggctgttctttccatttccaaagagattattaatgaatagacctgtggattatttcayattggaagatttctaggatgagaggagtgaagaagtagtaaggatttatgggtagcaactatttggaaccatgagcagccttctgacaaggcagaattgcagtgaattaattcctctcatacaccctgcctatcatctactatatactcattctggtttttggtcagattttgggatatattgataagacttttctgaatataggtaaagaagaawttctgaatagacagtgaaaaacaaaaggtactctggctaatttttggtgcattccacccagttactctgtagataactttgtatgtgaattgatatttcaacttgtttagtgggctgtctttggtcatcagaaagggatatgcaatggaagcaaagcctttt

SEQ ID NO: 96526 - DNA, 599 bp, Chicken  19866894937654_1
  misc_feature (1)..(231): n is any nucleotide
nnnnnnnnnnnnnnnnnnnnnnnnnnnnnnnnnnnnnnnnnnnnnnnnnnnnnnnnnnnnnnnnnnnnnnnnnnnnnnnnnnnnnnnnnnnnnnnnnnnnnnnnnnnnnnnnnnnnnnnnnnnnnnnnnnnnnnnnnnnnnnnnnnnnnnnnnnnnnnnnnnnnnnnnnnnnnnnnnnnnnnnnnnnnnnnnnnnnnnnnnnnnnnnnnnnnnnnnnnnnnnnnnnnnnnntagttgtaagagagccatgaggtctcccttcagtcttttctctagacaaaactgtcccagttccctcgrttgctctttataactcttgttttcttgtccctgcactagatttgttactctgctcttcacatacttgagtaacattrtgtttcttgtagtaaggggccccaaactgaacaaactgaacacagtgcttaatgtgcagtcttaccagtgtcacgtacaaatggaaaatcacttcctagtcctgctggtcatattacttctgatgcaggccagaataccattgactttcttggccatctaggcatattgctggctcatattcagctagctcacaaccagcaaccccagttccttttctgctc

SEQ ID NO: 96527 - DNA, 599 bp, Chicken  19866894937654_2
  misc_feature (1)..(154): n is any nucleotide
nnnnnnnnnnnnnnnnnnnnnnnnnnnnnnnnnnnnnnnnnnnnnnnnnnnnnnnnnnnnnnnnnnnnnnnnnnnnnnnnnnnnnnnnnnnnnnnnnnnnnnnnnnnnnnnnnnnnnnnnnnnnnnnnnnnnnnnnnnnnnnnnnnnnnnnnnntagttgtaagagagccatgaggtctcccttcagtcttttctctagacaaaactgtcccagttccctcgrttgctctttataactcttgttttcttgtccctgcactagatttgttactctgctcttcacatacttgagtaacattrtgtttcttgtagtaaggggccccaaactgaacaaactgaacacagtgcttaatgtgcagtcttaccagtgtcacgtacaaatggaaaatcacttcctagtcctgctggtcatattacttctgatgcaggccagaataccattgactttcttggccatctaggcatattgctggctcatattcagctagctcacaaccagcaaccccagttccttttctgctcagcaacttttcattcactcttccccagtcctagaactgtgctggattgttatgactcaggtgcaggtcccagcattt

SEQ ID NO: 96528 - DNA, 465 bp, Chicken  19866894938070_1
attaacttaaaagcttgaaattaatattagttccctgtcttctttcttgccctttcccattctatataaacaaaagcttaagaaatcagtacaactcacatcaggaaggaggaaagggtcattttggagaagcaggattcgcagctcattctcacttaggccagacaactcatgagtcttcagaacttttttgttctcagcactggtgatgtcatgagagtatttgcaaactctgcaagaaaatggacagcaactcctaagcaacagtttactccttcagtcaagttgatttaaagagcmtcagataacgtggaacttcagaaaaaacacggagagaaaggcactttggcaaaagtctctgtgaacaagtaaattgtctctgtcactaaattagctggattatgaaacaagcagcataatcactgtgaaatacagttgtgttactataccaattttaaacataaa

SEQ ID NO: 96529 - DNA, 600 bp, Chicken  19866894938268_1
ataatggactgagtagggcaccaagccttttgaaatggcttttagctattaattatttatagaaatatcactcccctggagttcactgtgtacttttttattaatcttttcctcaaacccagactcttcaacttgattttatagtatacttttaagaaggttcatgtgaaaactaatccagtgatttgcactttgtgtaaacaactctggtttctaacaggcaaggtaaaagattactttgaaggggttacacaaacttcaagaggttgagtaatgatgcatgacttcatctctcttcaraacactctaaaaagttgaataagagcaacatcagtgtctcttcaagtaattgatttggaggaaaagtagaaaagcaatccaccctccatctttattattaaatgtgtgtttctgtgatcaagaacaagggcttctttaagattccctacagtggaaatcctataactgctgggtgtgttgccctcttcaacagaagagggaaaagattaacaagagtttaaaagatttgatattaaccataatcacatttgttgtatggtgaaccatcttttttcccttccactattggttgttcataag

SEQ ID NO: 96530 - DNA, 600 bp, Chicken  19866894938359_1
agctgctattttaggcatttctgctgcctctcttgggaatattttgaaatcagttgacttctgattaccggaaagtcagagtttctgctgtggggtgggttgccagaaattgctgtttccagttgtgacatccactgacatcaccactgctgctgaagatggtcttctgtagtggtagctgtgtgcagaggagctcagggggaggtggttctcatggttgttgattcaatcatagaatccttagagttggaaaggacctttaaaggtcatccagtccaaccccctcgatgaacaggtacwgctcatatgtaaacaatgctatgtgtttgctgcttttcttttggcagcctaatcttcatcgtttggctgctggcagcttcacaaaactatgcaggagttttcattattgatgcctctggacctctaaatagagaactatcagtgaataagtacagtatggattcatttaattattaatcaggatgatagggtattctctgaggtacagaattctttttcaaagacaactgaagtcaatagaaagttttctactggaataaaataatcatgagagtaaatgctcatcagtacgagcgagaa

SEQ ID NO: 96531 - DNA, 600 bp, Chicken  19866894938648_1
ctgtcccatcctgcagggagcctgccatgtccttgtccccatcccccagggagtgacacaccaaggcgatgacacagggacagaaggacccatccgtgtccatgtccccagggctgtgacacagggacccccatccccagtgagatgacacagggacaccgctgagtccacgtccccaagagggtgacgcaaggacccaaccatgcccgggtccccccgggggtaacacatggacctcactgccacctcctccctgtccccagtggggtgacacagagaccccactgtccatatccccamgagggtgacacatagaacccgaagtgtccacgcccctgtccccaagggatgacccccctgtgctcacgcccccatccctaaggaggagacacaagcacaccaccaggtcctcgtccccactgggttgacgaggggtccccacagcgcccacgtccccaaaggggcggcgctgtgtcgctgtccccgaggcggtggcgcccacctgcagtccacgtagcggttctgatggaagaaagtggtggtggccacctccccgctcagctctcccagccgcggcgtccccgagatgttggcgcacag

SEQ ID NO: 96532 - DNA, 599 bp, Chicken  19866894938769_1
  misc_feature (1)..(105): n is any nucleotide
nnnnnnnnnnnnnnnnnnnnnnnnnnnnnnnnnnnnnnnnnnnnnnnnnnnnnnnnnnnnnnnnnnnnnnnnnnnnnnnnnnnnnnnnnnnnnnnnnnnnnnnnnccctcggttttgctctttgaagtccattaattggttgtgaaggagtaaatccatttttagcttcatttcctggggaaaacttctgtacgtctgcctgtcctccccccagtcattccggaatgcattggccaaagccaacagaagtagagatgtcatatggctctctgcctacaacctaaatggaagacaagcatytggggagaggtgagaggaacccattcaccgtccccaaatcaccggcacatccctcatcccacatccacatgggaagttcagttctcaaaacactaccaggttttgcagatgtatggagcctgggctgtcacaccccaaatggaaaacgtttctgcttgcttctggttgggaactcagccaccacttcataaatcaacaccctgctatcgagtttgctccgcgagcagacagtttgatgtgaaacaatgcagtcctggaggcgtcagcttccttgggttatcttygtgggagaccaacat

SEQ ID NO: 96533 - DNA, 575 bp, Chicken  19866894938769_2
atggaagacaagcatytggggagaggtgagaggaacccattcaccgtccccaaatcaccggcacatccctcatcccacatccacatgggaagttcagttctcaaaacactaccaggttttgcagatgtatggagcctgggctgtcacaccccaaatggaaaacgtttctgcttgcttctggttgggaactcagccaccacttcataaatcaacaccctgctatcgagtttgctccgcgagcagacagtttgatgtgaaacaatgcagtcctggaggcgtcagcttccttgggttatcttygtgggagaccaacatcacaggtccactttatccactgcaacgcctgtgctttcaagctacccctctcagtcagaaattcccttccacaacaccttgagaggtccaaaccacctctatttttaagctgtgatacaacagcattttcaaaatgttgaagatgccctatgccttagcacctccaccttggagaggcttgcacgtatgttcggcctcatggcatgccgagagctaaatgtgctcaaaacctcattatcagagcctgctttaggtgaacc

SEQ ID NO: 96534 - DNA, 599 bp, Chicken  19866894938903_1
  misc_feature (1)..(60): n is any nucleotide
nnnnnnnnnnnnnnnnnnnnnnnnnnnnnnnnnnnnnnnnnnnnnnnnnnnnnnnnnnnnttcgtcagaaatcatcacctagagacttgtttgtacatttaaagtaaacaccatacaaatttctgagctcacacaagaagctgccatgccttgcaaatactttttattctgcagtttcattcccatataaaacaccgcatgttgctaaaaatatttttacattgatctgtttgaaatgcacctgcgttacatgagctgttttgtttagcccttgtttttaaagaatgtagcaagtaaaaycagtaatcgtcaacaagctgtgacaatgtgagaacctcagtatctgcatttggttacaaaagaaccacaggatggcttgggttggaagggacctcaaagatcatccagttccaacccaagaagtgcagacgacagcgtgaactcaagcattttagtactggggtctctgtatgaggaataggggtttcagaatgaggcagcaaccatttcagaaatgcatccagatgtctgctccttaaatatttacaacacagagctatcacaactggatcaaatcacaaaactttttgcttcttgct

SEQ ID NO: 96535 - DNA, 599 bp, Chicken  19866894939557_1
  misc_feature (1)..(79): n is any nucleotide
nnnnnnnnnnnnnnnnnnnnnnnnnnnnnnnnnnnnnnnnnnnnnnnnnnnnnnnnnnnnnnnnnnnnnnnnnnnnnnncttttttgggatgctgaaaaacatctagcaattttgagggtgttttcttcctgcagcttattaataccaagcacttgtttctatttgccagttctagcgaactagcaggctgccaaggtgctaatgagtgtgcagtctgaatagtaattccaatgccattggtgatgatgattaggaacactcctgaatatagatggtgctgtcttgacccctgtctctgmcctcaatttgaatgrgttctactctactccaaaagatgtttcatctcttttaacaaaaaaagtttagaacattttgttttgcttttcaataaagtgtgctgtcacttctgaaagcacccttacataagagagaagtgggtaaagatttgcttccatatcctaaagttgctcaagactagatcaaaccaagcaagcactgaagcaaatgaaggtagctgctgtcagacacaatctggagcccttccatagttccagaattgtgattataatagtagggtttccttctctttcccatccca

SEQ ID NO: 96536 - DNA, 599 bp, Chicken  19866894939557_2
  misc_feature (1)..(64): n is any nucleotide
nnnnnnnnnnnnnnnnnnnnnnnnnnnnnnnnnnnnnnnnnnnnnnnnnnnnnnnnnnnnnnnncttttttgggatgctgaaaaacatctagcaattttgagggtgttttcttcctgcagcttattaataccaagcacttgtttctatttgccagttctagcgaactagcaggctgccaaggtgctaatgagtgtgcagtctgaatagtaattccaatgccattggtgatgatgattaggaacactcctgaatatagatggtgctgtcttgacccctgtctctgmcctcaatttgaatgrgttctactctactccaaaagatgtttcatctcttttaacaaaaaaagtttagaacattttgttttgcttttcaataaagtgtgctgtcacttctgaaagcacccttacataagagagaagtgggtaaagatttgcttccatatcctaaagttgctcaagactagatcaaaccaagcaagcactgaagcaaatgaaggtagctgctgtcagacacaatctggagcccttccatagttccagaattgtgattataatagtagggtttccttctctttcccatcccaccaacttcttgtctt

SEQ ID NO: 96537 - DNA, 599 bp, Chicken  19866894939794_1
  misc_feature (1)..(14): n is any nucleotide
nnnnnnnnnnnnnncttcaacgatatacacccctctatgtgaatgattctcctttcggtgtactcctctcacgttcactttctttaagtaagagaaaaatgcaggtgtaaaagtcagctgtaacttaaagtaacagtgatgaccattttgtagtgtagatctggcacttgatttttctcaggccgtgcagtctattcacaactggttaacgtgccccaaaccacaactagccaaacattcccttcagtgtccacaatcaatccacagatgagaggaagaaactgcagaagacttgccagrtagcataaggtaataaagaacctaaggaaattgcaatcttctctgggacagtccacaaattgaaaaagaagctagatttgcaggataagtaattyattgcaaagttattcactgagctattggaatcaaataaaaggagggagaagggcccagaatatgctaaggtaatagaagttatgacgctattggcacgtgaggaatacgcttcctcggaaggatgacaaagaggatctggctctttagtggcatttttcagaagcagagcaagaaggaagaagctagaagaaaaatagaagcag

SEQ ID NO: 96538 - DNA, 541 bp, Chicken  19866894939794_2
aaaatgcaggtgtaaaagtcagctgtaacttaaagtaacagtgatgaccattttgtagtgtagatctggcacttgatttttctcaggccgtgcagtctattcacaactggttaacgtgccccaaaccacaactagccaaacattcccttcagtgtccacaatcaatccacagatgagaggaagaaactgcagaagacttgccagrtagcataaggtaataaagaacctaaggaaattgcaatcttctctgggacagtccacaaattgaaaaagaagctagatttgcaggataagtaattyattgcaaagttattcactgagctattggaatcaaataaaaggagggagaagggcccagaatatgctaaggtaatagaagttatgacgctattggcacgtgaggaatacgcttcctcggaaggatgacaaagaggatctggctctttagtggcatttttcagaagcagagcaagaaggaagaagctagaagaaaaatagaagcagtttttatccacagcccatagatcctggggccccagag

SEQ ID NO: 96539 - DNA, 600 bp, Chicken  19866894939916_1
tttgccattctcactagagtactctcattgcacttgggagtgcttgttaatacagcatcaaggcttcaggcttggggtaacgatttcaatcttgactgcttttgaatctcatctttccccagatagctttttgtcccctctactactgtacgttacaaggtgagtcagtgggagacagattgttctctccaactgcttctcagtttgtcacaaagcctgtgaaatacccagtgggcaccaggcagctgctgtgacctcgctgcgtaactctcgtgtcactgctgccctgggctgccttcrtcatgttttcctctcgtggtctgaaacatgacctgggaccatcatcacagttaacacatggggtctctgagacattttaagttaagccgtttgggcaccagtgtgctacaagtaataacagcatgagtgaagtgagcacgacttgaattatgctaacttgtgccctggaggtttctctcaggcagttgccatccatttgtatgcacagacaactgacaatcagattgttgtaaagtagccttatttttagttagtgcagagtcacagttgggctctgttttggcattccctctatctaaa

SEQ ID NO: 96540 - DNA, 521 bp, Chicken  19866894940445_1
cctgtattcatactgtgcatgcaggtgcccttatccatgtattttcaaaagggaatccagcagacactgtgccatgtgagatgacctgttttctatggacactagttacacactgcagaagagagactgttttttcttctgtctcccctttgtttcgccctgtaaatgttaagggttaaatgctgaaagcgattgatctctgctgatttggagcatagggctgcagagtgtaacaacaaaggttagaattgtttaaactgtacaaaggatgtttttcatgcactctcagagcaagagctytaccagtttgaagggctctgayaccttttttgttattttgaaggtacttccttaagttgaagtgtcctaacgcatcagcctagaggtccttaacccctcttaatcttcctagtaggtacaggctattatcttgtggagtttcagatgttcctatgaagcatggagagaaaccatcacgcgttcttactccaacacggcattattaatatgagagatgctat

SEQ ID NO: 96541 - DNA, 499 bp, Chicken  19866894940445_2
aggtgcccttatccatgtattttcaaaagggaatccagcagacactgtgccatgtgagatgacctgttttctatggacactagttacacactgcagaagagagactgttttttcttctgtctcccctttgtttcgccctgtaaatgttaagggttaaatgctgaaagcgattgatctctgctgatttggagcatagggctgcagagtgtaacaacaaaggttagaattgtttaaactgtacaaaggatgtttttcatgcactctcagagcaagagctytaccagtttgaagggctctgayaccttttttgttattttgaaggtacttccttaagttgaagtgtcctaacgcatcagcctagaggtccttaacccctcttaatcttcctagtaggtacaggctattatcttgtggagtttcagatgttcctatgaagcatggagagaaaccatcacgcgttcttactccaacacggcattattaatatgagagatgctat

SEQ ID NO: 96542 - DNA, 600 bp, Chicken  19866894940693_1
gggtgtcctggacttgctggcagccaaccacaaaagcatgacatgcttcttaaggttttgggctcattttccagtcccaagaggaaggaggctgtgacaggaaagtaggaattactcttctggcttgatctcaatgtccactccattcagcaaccatacgcctgatgcagactagtattggatgcttcccagagcgtagaaaaatctgcatttctttttccaagtccaggcttccaggaggacattaaagagctttttcaactttattctcattcgatttaacactgacaatagcaacgytgggtattcttgatagtgcctgctcccttttggaaggcagtgccaatagtactgcccaggacaggaaagcggaactggaaatgattcatgggactaaaatctgtagaatagaggtgaattgttggccaagccagggctctcccacgcgggctggtacagatagcttggagttttgaggggaggaaaaaacgcctgtgtgagaaactgaaagacgcccaaagggctttgctaagccttcttaaacttcccaatccatcgctgtgtttttaccaccagtgttatttattggctgtgtgcttg

SEQ ID NO: 96543 - DNA, 600 bp, Chicken  19866894940925_1
taaatgggacaaaacagaataattacaggtgaaaagcagacacagcagatatttgaatgatgtaaacacactgttccttccatggctgcattgcatgggagtggctcattgcagcaggctgtgtgctggtgtctgcagtgccctttgtctctgctctgtgcccagggtggagacagtgctgcgatttcattcctcagactctctgctctgacctttgtgggtaacatccatccagtgtgcatccaggataaaagcactggtgtctctctgcaccacaatccatcatgtttccatgtcttyctgatcttttgatggctttcccgcatcctaattatttgtttaactttacagagtattttcattctttgtcctcttagcaggagatgaagaggatgctgttcctttttgttctgattccagcagaactgcaggcttcttgcccatctattactgtattttttttttctctttttctcacaaagaataactgcattgaagaactgcaatgtttctgtggaatttttgtttgttattgggttttctttttcatgataactttatttccccacttagcaagttggaattttctgggcttttttg

SEQ ID NO: 96544 - DNA, 600 bp, Chicken  19866894941183_1
agaacgtaactataagttaccgaagactgaaacaccagaagacagctgaacagtaagtagaagcatagagacactacttacgtgtatcacatttccagcagttgcaaatttctggtttaatttaaacacagtgtgtcaaatgaggaaagaaaacacataactacaaattatcctacggttattgttttgacagagttctgccatgctggtatgcttttaacatttttaacaaaggatgggccttagaggcagcatccccacagtgtgggagacactgggacacaccacttggcacaccayatcttagtgcagttatgagcacatattttaagctgaaatttaactcccatcccacagcaatgtgattgagagttaattcaaattatccagtttttccctgggtctgatctttgtgatccagggaaaaagttaagaaaacccaacaatgacaaacagtaggaatctctaagctgtttcctaagctccagcaaatgcacaaagtacccttgacagtctccttaagtttgaaaaacaggagctaacctaatacattaagtcatatcttcaaggaagtatcaactacatgtccactaagtacat

SEQ ID NO: 96545 - DNA, 600 bp, Chicken  19866894941217_1
cctaagctgaacatttttttgtgtgtgaattctatctataacttcaatcagaagcatatattactgtagccagaaccaaatgttttagtattgctgcagtgtgcttgccgtttctctctgacttcagcctctgtaaagattacagcacatgctatcataatgcaattttaaaagtgactttttgcttgctggaggtcagcaggacaaaaggttattccatggcaattatttttcccatggtttcaaaaggaaaattcaggtcacattacttaaaaatgtatttcacccccctaatatttyagttgctcacattctgccaatcatacttttccgaagttgcctcagatattgttaagagctttctgttttactgttcatctgacctgtaggcaaagatagttctcatcagagaaagagatctgcttttctgtaaaaaacataaattccccaatgaggaaggaaaaaaaaaaaaaaagaaagaaagaaagaaaaaaaagctaatactgaagtcagcaagtgttttcaagaacatactggattttttctacaactgagaatgtatcattttagaaggggacagttatatttgttagcttccta

SEQ ID NO: 96546 - DNA, 600 bp, Chicken  19866894941497_1
ggaacggcacatcttgactccatcaaacttttaagtaaataaacatgaaggatggaagagaaagaaagcacagtttgtctatttctggggtttcaacatgtgttcagattggaagcgatgtttaatgaacaacataggcaatcttaccagctgctaacaatgaaacatttaacaccaacaacagaagactagatcctcaggctccagaacatctccacccacctgacaacatggtagtaatcattagttagcagggaacatgagaaggaattgaaccatcacaagtcatactttagataygtcttatccttaatttgggaccacagtgcaggcacttcaayggtgtaagctgatcctagctcttcagtgcttttcattacttcaattttaattcactcttcatatatacatatacatacagaagacacagggtaaaatcttcctcgtaattcaccagaaatatctaaggttcaaagtttaaataaacacagtttaagcagttccttcctctacaattcttgtaatgaatagcttttgaagcttagcatgttagacccactaacaaaacaatttctggaccgagtttgacagctgaggcta

SEQ ID NO: 96547 - DNA, 600 bp, Chicken  19866894941497_2
aacatgaaggatggaagagaaagaaagcacagtttgtctatttctggggtttcaacatgtgttcagattggaagcgatgtttaatgaacaacataggcaatcttaccagctgctaacaatgaaacatttaacaccaacaacagaagactagatcctcaggctccagaacatctccacccacctgacaacatggtagtaatcattagttagcagggaacatgagaaggaattgaaccatcacaagtcatactttagataygtcttatccttaatttgggaccacagtgcaggcacttcaayggtgtaagctgatcctagctcttcagtgcttttcattacttcaattttaattcactcttcatatatacatatacatacagaagacacagggtaaaatcttcctcgtaattcaccagaaatatctaaggttcaaagtttaaataaacacagtttaagcagttccttcctctacaattcttgtaatgaatagcttttgaagcttagcatgttagacccactaacaaaacaatttctggaccgagtttgacagctgaggctaacatctctctgagcactgaagcttgattatgtgggttttgt

SEQ ID NO: 96548 - DNA, 600 bp, Chicken  19866894942294_1
aatttctcactacaagccttatgatgtaattaatcttctttctgcacgctatctatacaccagttaataatttatttagttatttgtcattaattaactgtcactgccattctctatggcgtatattttctaccagagcttgtatgtgaggctgggggattgttaaggtcaagcatatcaatttgccgtttttcctccccctctctctctcattccttggcttagacgctttaaaggagatcactgaagttagaatctgagacctttttcagccaaggagtaactatttagcaacaggaycgatagagtaattgcagatttatcaaattctttagagcctgtttactgaagaaacacrggaaatctttcatgacatttgctagctttaaaataatcaatttatagtgaaaggaactgatgaagatcagtattataagttccttaaaactgcactaaacttgcgcctgcatctgtttctctgttaatctcacaccaactaaatatgaacttccatttgtaagcgaagaagctgttcatgttctgtggtctagctgactaagaattgccagggtgggagcagtggctgggtgcagtcctcat

SEQ ID NO: 96549 - DNA, 600 bp, Chicken  19866894942294_2
accagttaataatttatttagttatttgtcattaattaactgtcactgccattctctatggcgtatattttctaccagagcttgtatgtgaggctgggggattgttaaggtcaagcatatcaatttgccgtttttcctccccctctctctctcattccttggcttagacgctttaaaggagatcactgaagttagaatctgagacctttttcagccaaggagtaactatttagcaacaggaycgatagagtaattgcagatttatcaaattctttagagcctgtttactgaagaaacacrggaaatctttcatgacatttgctagctttaaaataatcaatttatagtgaaaggaactgatgaagatcagtattataagttccttaaaactgcactaaacttgcgcctgcatctgtttctctgttaatctcacaccaactaaatatgaacttccatttgtaagcgaagaagctgttcatgttctgtggtctagctgactaagaattgccagggtgggagcagtggctgggtgcagtcctcatgatactgttaatactgaaacaaaggcagaagttatttgttatcatactatcaaaaatc

SEQ ID NO: 96550 - DNA, 600 bp, Chicken  19866894942591_1
tagaagatttacatatggcaggagaagcatgcgacttttcattctttggcatcatttgtttttatgccaaatcatcagcacagatcacttacgctacctcaaactgacagctgatggagaagtacagaccactttgccctttcaaggacacggattatgtgaggaacaactcagtgctactgagctgggcacctacgggctgagtaccttaacagcagtactacgaattatattgagtatccacaataagccaaagatcacagaaaaatagcaataaaaatgatgagcagtgtactgcakggcattgagtcccccagaaatcagactcttgcacctaaacagcagagagatacaagagaagtttacagcagttagatttgaagtagaatcaccaattctggcattcattagaaacagttacagaattgtagaatgatttgggttggaaaagacctttacaatcatctacttccaactccctgctataggcagggacacatccctctagaccagattgcttgaagccccatccagcctggccttgaatgcctccagggagagggcatccacagcccctctggacaacttcctccagcatct

SEQ ID NO: 96551 - DNA, 530 bp, Chicken  19866894942780_1
tgcaaaatgaaatcaagtcatgtatggaatcaaaaggaaaatgcatgccagaacttggagataaaactggctcacagatctagcatttttggtggatttgaccatttgttcaaatgagttaaatgaatatctttaaggtgaaaattgatttatctgtgctgtttcaaaccatagcagcatttgaaattaaacaaattgtggcaaactcaagttataacaaataattttatgcattttgatatgttggctaaacacagtcctgtgaatagcaaaaaattggtggccttgctttccattttkataaaggaatttgagaatatctttcaagatctccaaatccttattctctttttctgtacttgactctattttcagtcaacataaatacggattttcaagttgaatgtatagagttgtaatcagacattcaagtcaaagaaaaaattttatcatgtctctttactagacttttatagaaccagtcttatcagagaaaaatatcccttgcttcacaaccacattttatacgt

SEQ ID NO: 96552 - DNA, 517 bp, Chicken  19866894942902_1
ttaatatgtaaaataaaaacatatggaagggtaacagaagccaaagagaagaggacaactgcaagcaatccccatgctcaccaacaccaacgtatcagttccaggagggataaaccccaacaccaggcacctactggtctcaagtggaggggataattagtgtagaatgtcagggtgaaggaccttccaaaaggaacacacacttgattatcacaccacagcaaaactccctggcctctgggtcaggccactacaaaaataactcaacagcatccaccagaagaacttgtaaaaacaagsataaagtcaccattaagttactgttcaagaaatcttttttaaaaggaagagatgaaacaaggagacttataaagaactacatttatttttctttacagcaaataccataaatagagctgaaacaattttcactgtgtgcaaaatacagaatttccatgtgaaaatttaaaaacagcattaaaaactatttaataaaaatattccattaagattataa

SEQ ID NO: 96553 - DNA, 600 bp, Chicken  19866894943052_1
agacctctgagctgcaagtctagagagaggagaggacttcttcatcattctcagactgtgaaggtgagagacaacagagatgataagggacctgctactggcatggcagcaaggggcacttgccaaaggacaaggaaactggtttcaaactaaaggaagggagatttagattgaatatatggaataagtgttttacaaatacagtggtgaggcactggcacaggttgcccagagaggtggtggatggcccatcactggacatattcaaggtcaggctggacagggctctgagcacctgakgtagctgtagacatccctgttctttgtgaaagggttgggataaatggcctttgggggtcctttccaagccttccaactgaaataattctgtgattctatgataatttatccaatagcatttgtgggagtgggggggaggaggggagggggaacttggagaagatttgcagggtaggtttacaggctttaaagaggcttaaatgagtaactttggcatgtagaaatatcaatgtcttctgtatatgtaccctcatactgcaggatgtgtatgtctttctgtaataagaggccttgccaatt

SEQ ID NO: 96554 - DNA, 600 bp, Chicken  19866894943117_1
tggctagaaatcaagattccatacaattattatgctcctgaaagactagttaactacagaaatggtaagaacacttccacttggaggcagtacaatcaaaatggtgtagtgtattaagaaaactgaagtattcctctcttctgttttgtttttctctctctggattttttgtccagataattaaaatccagttttctcggcagaactagtaggcctgattgttttcacaaccaaatgtcacagaaactgtgagccagagctgtgagagggtgaatcttagggaagttttcctgggaactyttaggtaccagctagtcttgggagagakagagctttgtattcccatttcaagaaaccagaaagtagactttgcctataaaatgtgccaaagttcctagaattttctcagaagataaagattcatgaacccagaaatgaatgttcagacccagttctagaacttcagggcactcagctgaagtgcttggccagaacttactttgcagtgctctgatctgatgccaaagtaaccctcattacgttactagcactccttcacaaatttcagtttgtagaaaaggatttagaatatggcagtag

SEQ ID NO: 96555 - DNA, 600 bp, Chicken  19866894943117_2
attatgctcctgaaagactagttaactacagaaatggtaagaacacttccacttggaggcagtacaatcaaaatggtgtagtgtattaagaaaactgaagtattcctctcttctgttttgtttttctctctctggattttttgtccagataattaaaatccagttttctcggcagaactagtaggcctgattgttttcacaaccaaatgtcacagaaactgtgagccagagctgtgagagggtgaatcttagggaagttttcctgggaactyttaggtaccagctagtcttgggagagakagagctttgtattcccatttcaagaaaccagaaagtagactttgcctataaaatgtgccaaagttcctagaattttctcagaagataaagattcatgaacccagaaatgaatgttcagacccagttctagaacttcagggcactcagctgaagtgcttggccagaacttactttgcagtgctctgatctgatgccaaagtaaccctcattacgttactagcactccttcacaaatttcagtttgtagaaaaggatttagaatatggcagtagtacacttaaaatataaaacaacttgatt

SEQ ID NO: 96556 - DNA, 545 bp, Chicken  19866894943274_1
ggaagagcagcccaagagcagccgcaggaaagggtcagacccagaccctcggtcaggatggtgcggagtgggtgctctttttgggaggtggcccaaaatgctgcctgaggatttccaggccccccaattcagtgtctgctcgctctccagaacccccgggcccacagcccagcgcagccccccggccctgctggcccccacacggcggtgggagctgatgatctggtatttgtgcactccaaatgaatagctgagaaatgagccgggaggtgcgagtgctgacagtgcaggcaagcagcrgtggaatcaatgctcgtgatccctgggggaaggaccaaggaggaggaaccaaaggccaattaaagactccagcagcaacgacttcaggatccatggtctgtcatcggcccctcatgagtcagcactttggatggaaaaggcttggtgtatctttaaacaagtgggactggagctgagaaattcctcattgatggcttgcccaagccgtgcagccctgtacccactggccagcctcttccatgcca

SEQ ID NO: 96557 - DNA, 600 bp, Chicken  19866894943275_1
agcaggagggcagctcaacaccaacccgagccctttattgaggctcagtcacaccgtgcagattcctgccctctggcagccgcggatggcgcacagctgcagccgctccagggggctctgaaagaaggcacgaggagcactgtccaagcacggccgtgaggcagccgggcccggccccgggaggcacagagcacgacatgtccaacgcctgtgagctgcagccccgcgcagcagctgccaaatggacggcaggcgatgggccgcagccacaccacgccagccctgagtccgcagtgccgragcacagccccgctccagctgctccccctgccctaatcctcctccaagtccttggccttcttcttcttcttcttcttctccagcggggtggcctctcccatcactttccttttcttcttgggcaggacctcttcctccagcccgttctcctccggctcygtggcagcctcctgctcctgctccttcttcttcttcttctttttctttggctctatgttgttctcctaagggaaaacgtayggtgagggcccggcccactgagcacagagacaaacactgcctccgtgcggccaagcagcc

SEQ ID NO: 96558 - DNA, 527 bp, Chicken  19866894943275_2
ggcagccgggcccggccccgggaggcacagagcacgacatgtccaacgcctgtgagctgcagccccgcgcagcagctgccaaatggacggcaggcgatgggccgcagccacaccacgccagccctgagtccgcagtgccgragcacagccccgctccagctgctccccctgccctaatcctcctccaagtccttggccttcttcttcttcttcttcttctccagcggggtggcctctcccatcactttccttttcttcttgggcaggacctcttcctccagcccgttctcctccggctcygtggcagcctcctgctcctgctccttcttcttcttcttctttttctttggctctatgttgttctcctaagggaaaacgtayggtgagggcccggcccactgagcacagagacaaacactgcctccgtgcggccaagcagccccccacactggggcacccccccacactggggcaccccccagccccacagaacagcagcagcagatgctgctggggcagcctggctg

SEQ ID NO: 96559 - DNA, 446 bp, Chicken  19866894943275_3
aatggacggcaggcgatgggccgcagccacaccacgccagccctgagtccgcagtgccgragcacagccccgctccagctgctccccctgccctaatcctcctccaagtccttggccttcttcttcttcttcttcttctccagcggggtggcctctcccatcactttccttttcttcttgggcaggacctcttcctccagcccgttctcctccggctcygtggcagcctcctgctcctgctccttcttcttcttcttctttttctttggctctatgttgttctcctaagggaaaacgtayggtgagggcccggcccactgagcacagagacaaacactgcctccgtgcggccaagcagccccccacactggggcacccccccacactggggcaccccccagccccacagaacagcagcagcagatgctgctggggcagcctggctg

SEQ ID NO: 96560 - DNA, 600 bp, Chicken  19866894943305_1
tagagcgaatgcatgattttcgggttaagggggggattttggaagagaaaatgcgtgttgtttgagataaacgggggatttttgtagagcgaatgcatgattttcaggttaaatgggggatttttgaagaggaaatgcttcgtgtcaggttgaatttggggtttttgaagccaaaatgcgtgattttcacttaaatgggggattttccaaacgaaaatgcatgattttctttttagatgggggattttcatagagaaaaggcatgatttttgtgttaagtgggggatatttgcaaaaaawaaacgaggcgtgatttttgggttaaacaggggatttttgaagagaaaatgtgtgattttcggttacatgggtgatttctgcaaagaaaatgcatcattcttgggttaaattgtgtatttttgcagagaaaatgcttgattttcatttaaatgagggatttcttgcagagacaatgcttgatttttgtttaaatgagggattttggcagagatcatgcctgattttcgggttaaacgggggatttctgcaaaaaaatcatgattctcgggtaaaatttggtgtagttgaaagagaaaatgc

SEQ ID NO: 96561 - DNA, 600 bp, Chicken  19866894943355_1
ctaatcatcagagtggcaaactcccgggatcatgctaggaagaagtagcaaccagtaattcccaccttatatttaaaccattaccttcagtaggaaacttgttctgtatctattttagccaagctacagctacactgcacatatttttcttcaacgaagcaggtgttcagcaagaacacctaggcttacctaggctcttcatttggtaagtatattcctgccaaaggttgggtagcagcaaatatggggaagtatcaatattgctagaagtgatccccagtgtgacagtattcaagcttycaacaagaatccacacactttaaatactcaagagcgtcccaatacacagaggacaggcatttcacagtggaatacaaaaccttgtttgctgaggagagagttggcaaactagcccctagaaaatacagaagctagaactccttttaattaggagaccggggaggaccaattctgaattgggtctctaattcactttgtgcatttggtgcctgttcagttttagatcagttctaaaggagaagaagcatgtagtctttaataaacttaaagaaaatacaactgcctattagctgctggctg

SEQ ID NO: 96562 - DNA, 548 bp, Chicken  19866894943455_1
tattatttttttaatcaggacccattatatgtgccatgctgtccatacagtgcttaataaactcgccatcaggaaatggttttgaggttttttgctaccccgtaagtaacttttataacagagtccatttgtgttttaattattttttttaaatattttgttgagatgacagactgttttcagtttcactgttttatctttatgaagtttaccttgacgtgaattgaatttggctgcatgtttctgcacacaatgtgtctttccaaattgtcatctttgaaaactgatgtaatttcctcrcagattaagcatagtgtcacctgatttgtcagcactgcactgtaccctccccatgtttcaggcctgggctgggttgctcagtgaggcacagcagccgccatgataatgacatgcttggaacaattcttacctttaaaaaatgtatgctatatatttaatatatttctgactcacattaaacaggcatgtgggtttttttatgcattgcttctcaaaagacacacgctatcacactatgcactcccaaa

SEQ ID NO: 96563 - DNA, 599 bp, Chicken  19866894943661_1
  misc_feature (1)..(173): n is any nucleotide
nnnnnnnnnnnnnnnnnnnnnnnnnnnnnnnnnnnnnnnnnnnnnnnnnnnnnnnnnnnnnnnnnnnnnnnnnnnnnnnnnnnnnnnnnnnnnnnnnnnnnnnnnnnnnnnnnnnnnnnnnnnnnnnnnnnnnnnnnnnnnnnnnnnnnnnnnnnnnnnnnnnnnnnnnnnnnaacccctggtttcacagaaagcttaaaaaaaaaaaaaaaaagcatagcacagagaggaccaaaatgcttctcatccacctgcaccacacacacagcacaactgctcagttcacgctcatcgtgcacrtttaatttagttaccaactaacaagcactgaggaggaaagaagcacagaaagaaatgagcccggatttcttctagccacaatgaggagaatgcacttttgagaagtgccataaacagctgcaagctgtcacaaactttttagtccacatactgcaaagagtgctcttaatttgaggacgacagacaccctccccacgtgtaacaatatgcaccactggtgctttaaaaagaacacaaaaaaccctccaaccgtgtgcaagcatcagggcacagcatgaaagaaataagactcttctaga

SEQ ID NO: 96564 - DNA, 600 bp, Chicken  19866894943751_1
tgctggttgtgctgtatccccctcctcttcatacctctttcatgtgcaaggagatgcaccacctcacctccagcacatctcacaaagagcttaaaaacatttgcaaaattatttgattaagctatccagaaaaatatgcatttgaaacaatttttctccaatttcatccaacagatgctttgtgtccttctcaatgaaaatgcaggagatgcaaatggaccaacacagctccagaatgacacagaagccaacgcatccaccagagaatgggaaccaaggggatgtgatccctgtggccaycccagtggaatgaaatgggcagccacgatgtatctgcagccactacttctgatgattaaaaaaagttaattagaacttctgaaacaatgagacatccagtttttcacgtatgattcatcctgtgtctgaactagtctcctgagggtcattttcatggtaaattagtctttcaaatgtcaagcttaaattatcagcactgacacccacgaccacggtgtcagagcagtgatggccttgctgcagataggcgtggtagtgacactgatgatattgagtctgacaatataaaaaattagctta

SEQ ID NO: 96565 - DNA, 600 bp, Chicken  19866894943856_1
taaaagacattaatatgttaggaataatcgtagcgatcattttctaaacagcctagcacctagtacccatgttctctaactagtaacttgtgtaatagttgtattcatgtaagagctgttctctctgtgctttgcaacagctcagagcaacacaaacctaatgccaagacagaaatttatgatagctaaaatatgatgcaaaggtgcatggccattacatctaaaagacagtcactgataaacttccaaaaccctttgtaatataaaacaaaccaaaacaaaaatctacagcccaagaaytctttggggccagcaaaaataatttgaaattaccagagactgatgtgatccatttcaatgcaaacctcgaactccctgttcagaaatatgacagagctgtcaggcactgcagctccttcccagccagtggctgaggagcttcacatcagctgaaagaaaggttagacctactgtatatctggtgtgtgctgggaamagatgggagcacagtgtttatggtaaagtccagttgaaaatataccaggagagcctgttgagttgtatgctcttgacttgaccgacaagaacagaaatgagggc

SEQ ID NO: 96566 - DNA, 455 bp, Chicken  19866894943856_2
tgcaaaggtgcatggccattacatctaaaagacagtcactgataaacttccaaaaccctttgtaatataaaacaaaccaaaacaaaaatctacagcccaagaaytctttggggccagcaaaaataatttgaaattaccagagactgatgtgatccatttcaatgcaaacctcgaactccctgttcagaaatatgacagagctgtcaggcactgcagctccttcccagccagtggctgaggagcttcacatcagctgaaagaaaggttagacctactgtatatctggtgtgtgctgggaamagatgggagcacagtgtttatggtaaagtccagttgaaaatataccaggagagcctgttgagttgtatgctcttgacttgaccgacaagaacagaaatgagggcatgacacaaaaatcctgattataaactgcatctcaaagatgaatgacattt

SEQ ID NO: 96567 - DNA, 600 bp, Chicken  19866894944570_1
ggaaccaacacctcctttcctcttggttttctcctccccttccttttccatcctggaggacaacatggggatgcctctggatccacactcccaacacggaatggattgagttggaagggacccccaaaggccatccagtccaactcccctgcaatgaacagggacgcctacaggatgcccaccggacaggtggggtagctgcagctcccaggaaacttatcacatgagaacagtcagcctcgagagctgagaaaccccactctgcagaggaaggcaaagtgttgctcatcaatccctccygaacagacaggagcaagactgagaatcaaacagcctttcatagcaggaagagcctcctgtcatcaacctcccaccaaataatagcctatgagaccctcccaggcacagccctactctctcaggtaagcagagagcacaggaggaaaaagcagcaggatgacatgaaggcagggctgcccatccccaaaggacctgcagccaccatgtgggctccagccacctttgcagagctgccagctccctctctgtgccacaaggacttgagttatctactccctccaatgcccagccacatgagag

SEQ ID NO: 96568 - DNA, 600 bp, Chicken  19866894944625_1
gaggttggggagcagatcaccccctaataactaatgcccaggtatttctggggaaagatcacattagtctttctttttttttcattctttgagtttctgttaatggtttaggtgagcttctggccatctcaaatcctacatttcttccagtcatcattgtggatttgtgagtgctacctaaaattcatgtgtatatatgtatatgtatatgtatatatatatatacatgtatgcatacacacacagacatatttgtatacatatatactatttgtatgtgttaatgtatacattaaacayatgtgcatgacaaatgcatatatgtgtatatgcttgtatgtatatcctttacaatgttgctttgctttgaagtcattgctgtattactaatattgtgctttgctattattatattcttttctgatataaatgtattttttcttctccatttttttgagacaaatgttctgctacagaattgtcagtgataaagaaaagaaaagggaaaagaagcatgtgtaatccagaggacattgccagtcacacagaaagcagagctgagctggtttttctgtgcaccatccatttcagttggcagtc

SEQ ID NO: 96569 - DNA, 600 bp, Chicken  19866894944672_1
ttgatatacataatactactttattccattgtttcatctttcttacaggtttaaaaatgtacaggggttcagaaccacctccacacaacagagtacatcagtacgggagatctagagtcaaaccacaagtgtgcaaacgtggtcagcttccattacaaaaagtaataggcaccatctttacatctgcgttttggtgaaagaaggaataatagtgcagtgttaaaaggcaccaataaccgggccttttttaaaagccaataaccatctaagaaaattacatttggttcaaaataataactwaagtgttttattgactggcatgcatctgaacccctggcaatttatttcacaaacccaatgtgcgcccttgcgaaataaaaaagatttcatcagtggacctgaaagtcagttcactacaaaaggaaatactgaagctcattgcctgtatttgatacccaactgtcttgttcaccttctccaagagcacttgtctgacaaacatctattcaacaactgcacagaagtatttctctgaaaacgagtacagtgttttaatcctgtagcattgacccatcccatgtgctaggaaaacattaggca

SEQ ID NO: 96570 - DNA, 600 bp, Chicken  19866894944674_1
ctcttctcagcatttcagtgaattaggttcacattaggaaacttctgtgagcagctatatatacagcattatggaatgttttctccagtttttcgtattttgtaactactaactaattgtgtgatttctgtgatttgaaatcacaatgaatgtacataaactcactaaatccactcattaaccttagaagttacctttggaggtaacagactaaggaagtggagatactgtagttgcacagcttgaaatgtgtcagatccctctagaattcccccttatgctaatgggccaatgacctgmtagtgattgcagtgatttctatcgggtttcaggtatttgggaactgtagggacagatcatccttactgtaatgaaaaaatgagagaatagcatgaagtgggaacattccctgaaaatttcctcttgggaaacatttctccattttattccttcgaaactgaagttctgctggacagcagttacaggcactgcctccaaaaacactgaaagctgtagggggaccagagcacctctgtgatgatcctttgccttctctttttttctgtctgctaagcatcttttgctctctatcggcacatt

SEQ ID NO: 96571 - DNA, 600 bp, Chicken  19866894944817_1
atttcaaaatttgcaagcactgttaaattaagaatgcagtagacatttctgtgcttgaagctgtgggtacatgtagaactgtgtttatacttagtgatagataatctgtcaagtttcaaaaaattagtaagataacttagaaaaaaccccaaatttttagtgcagactgcaagaaagacagagtgttggtcctggaaccgttactcattcagataagtacagcagagcccgcagaacaacatatgtgagtaatagcatgattgagtcttctagtcaggctttagaaacgcagatctgttmaagagagaggaacagcagtataaccagaaaagtcctagaccaatcatcctaatatttagcagcagatttttacaacagaagtaaaacaccagaaaaaagaagtgatttcagtcatgtctgctgtggtcaagaaaagcgtttaggtgtgtcctcacttgtatcacacttttcagcacaggaaccagttattgtaattcagaagatttcttgtttcctgatggcaacccactgggactccagcagctgggtggatcgaaggagggctggatactgctcagagcctgccagtgaccacaggga

SEQ ID NO: 96572 - DNA, 583 bp, Chicken  19866894944824_1
aatcactggaaaacacagcccaattttaccattcattgttaatggatttttcaatatttagatttctgtaaatattatttttacctgttcagcaggcaataaatgaacaattgcaacatgtaagtggtttcccttaagtactcagtattttctatacaagattcatcatcaacatcacatggtactgtttctgtttctggtgtagctggctgaaaagagaacagcagaggatagcaaagaacaagtaataaatacatatgtcaatatgcaaatatctttctttaagtgaggaagtatttwaaaaaaatgttattcccccaagcatcattacaaacttgctcctgtaaatatttgccatttgaaagtaaaagcagtttaattgcaattaaaacaaacatccagttagaatttaaaaaaaatatttataaatgttatttgcaatatatttctccatatttattttcccctatactttttaaatgcagagaacataaaacatgcagtttttaaaccaaactttacattgtattttttatttttgtctgactgagtttatgaaatcagagataatgctttctgttag

SEQ ID NO: 96573 - DNA, 600 bp, Chicken  19866894945272_1
aaacagtggatgtgagtacagtgaggtggtgagtggcgcatttcagcagtggcaatagtgacagtgggtcacctccactggtgcagtttttcatgggtgtggcctgcaggctcttgttcatttctggcaaagatgcatagctagtgatggtgaatctgttaaaaaatagtgttttgtagctgagaatttgcattatcaagtaacgttattgcattctttgtatctgttgtagtttccataaaaataaaaaggaggcattacttgcagtgagacctgtatatgtgtaggcagcaaaagagwaaaaaaaaaagcattaatttcagaacttgttggcaatgtcatttgcttaccatttttccttttctttagataaaataatgcctaatttactacagaagtagaaagatttttatgttggttccttcatgtgggtgaaatatattgccacctctttcactgtcagtcttatgagagtatggtgggattcttgggtaaccactcatctgtgaatcagtcatatgtcatgtgtcaggtgtgtgtcctgttggtaatatgaaggtttgttcaggaccacccttgcttttgaccaagtctggaatt

SEQ ID NO: 96574 - DNA, 600 bp, Chicken  19866894945362_1
ctatggatgatcatgtgtttaaataaaccagtgtttcctctgagacaagactgggctaaacacacactttttgcagcaacggcgttttttggagccggattccacgcacccatccagactagaaatagtttcacccatgtccagctggatacaaacaaggcagcccccagggagcttgctgcaatttggttccagccttcaaaggcaaccacagcagtaacagggaaacactggtaagtgttagaaacacagggctgcagagactggcatactctttcaagccattcctggtgcttctgyccatatagcagcagcttgggatggcacggcagagcaggtttggcgcatgcagaccacgaacacatctgcatactgcccaggcaaagaagaggtggcagcaataatagcagtgagctctcctactctgccctttcttttttacgttgctttattttttcacagcactgtagcaggaagagatgaaagcagcatatatacctccttgctaagcacctccttgcaaacatcccatgaagacccagcaagttggccatcccggagagcagccaccaaggaggagataaacagtctttaggtcct

SEQ ID NO: 96575 - DNA, 600 bp, Chicken  19866894945751_1
aggtactaagacactaacttgtacagtaagtcacacaaacacaaaccccatgcacatatcattttgcattctttttcaggcccctacgcactgctcctctccatccttcccacagttaaggagcagtggccaagctcatcattacattggtttaatatcttctaacttctgcttagtaattagaacatggagcagatgtgaaacccacacaaatgcaacaagaacaaaaggcttgcaaaactagcttgttttgtactgcgcttctgacatctgccattaatttcaacagatttgttatayattaacatgttcaccagtcaccaggtcaaaaaagacttacttaaaattactcactattactggtacaataggcagtaaacagctacatatctattaaattaccaaatttttttgtcagttgatgaaagactcaacatgagccagtaatgtgagtttgcagcccagaagaccaaccgtatcctggattgcatcaagagaagcattaccggcaggtcaagggaggtgattcttcccctctactctgctctcatgaaactccatttggcggattgcaaccaattctggaaccttcgatacaag

SEQ ID NO: 96576 - DNA, 599 bp, Chicken  19866894945892_1
  misc_feature (1)..(205): n is any nucleotide
nnnnnnnnnnnnnnnnnnnnnnnnnnnnnnnnnnnnnnnnnnnnnnnnnnnnnnnnnnnnnnnnnnnnnnnnnnnnnnnnnnnnnnnnnnnnnnnnnnnnnnnnnnnnnnnnnnnnnnnnnnnnnnnnnnnnnnnnnnnnnnnnnnnnnnnnnnnnnnnnnnnnnnnnnnnnnnnnnnnnnnnnnnnnnnnnnnnnnnnnnnnnnctgattgtctggggacccctcctctttcctgatgtgactgaaatatcattcagtggtgaagttgtacaactgacccgccctcagcacgtctgctrggatctatacagatctatacagattgcaaatgactgagcagaattcagacctgaatacacyaaaaatcaaaaatgacctttgatatcaaaaacatagtatggttctttgtgcattcaaatactcattatatttatcttaactgtacttgcagaaatctgaggcatttggcctactacattgaaactcattgtttggcctttttttttttaatttacattaacaaccagagaaaatttactaacatgccttggaaatgagaaaacaaattaaagcaatgaataacctctattccttaatg

SEQ ID NO: 96577 - DNA, 599 bp, Chicken  19866894945892_2
  misc_feature (1)..(144): n is any nucleotide
nnnnnnnnnnnnnnnnnnnnnnnnnnnnnnnnnnnnnnnnnnnnnnnnnnnnnnnnnnnnnnnnnnnnnnnnnnnnnnnnnnnnnnnnnnnnnnnnnnnnnnnnnnnnnnnnnnnnnnnnnnnnnnnnnnnnnnnnnnnnnnnnctgattgtctggggacccctcctctttcctgatgtgactgaaatatcattcagtggtgaagttgtacaactgacccgccctcagcacgtctgctrggatctatacagatctatacagattgcaaatgactgagcagaattcagacctgaatacacyaaaaatcaaaaatgacctttgatatcaaaaacatagtatggttctttgtgcattcaaatactcattatatttatcttaactgtacttgcagaaatctgaggcatttggcctactacattgaaactcattgtttggcctttttttttttaatttacattaacaaccagagaaaatttactaacatgccttggaaatgagaaaacaaattaaagcaatgaataacctctattccttaatgcaaatggagataaaataatgatgcaatataacagagaygaagactaatatctgcagtaaat

SEQ ID NO: 96578 - DNA, 559 bp, Chicken  19866894945892_3
gcagaattcagacctgaatacacyaaaaatcaaaaatgacctttgatatcaaaaacatagtatggttctttgtgcattcaaatactcattatatttatcttaactgtacttgcagaaatctgaggcatttggcctactacattgaaactcattgtttggcctttttttttttaatttacattaacaaccagagaaaatttactaacatgccttggaaatgagaaaacaaattaaagcaatgaataacctctattccttaatgcaaatggagataaaataatgatgcaatataacagagaygaagactaatatctgcagtaaatatcctgtactgtaacttgggaatgaggaacccttaatgctgttctgcatgaagctgcaggaaggagcaccgcaacaggaagcacagtgcctcagatcaacatccatttgggatgagaagactgatgttcaactaatattacctgaagaagtttagttaatctcccacacctaaatgcaaaggcaaacagctggaaagatgagtgagtaacaaatgagcaagaatcgggtacaacgt

SEQ ID NO: 96579 - DNA, 600 bp, Chicken  19866894946271_1
tattttcttatgcttttacttgtgttgttgcaagagtaagcagtttcactcatcaaatttctattattgcttacaatcccaactttgttgcttttgtttgtagagggaagagaaagaatgtatgtttctgccacagagtagcatgttgcattttctttagagatttcaaatagtttgatcttttcatgtgaaggcagagagagagaatcccagatgcacttgcaagaaactgcaacaggattgtatttatttcgtgagatagagaggatttgaacttcttcctgttcaccggacattgcmacccctttccatttaattactaatccctcactgtcctgttttcatatgctacaaatgttctttggctctgtgtgatgtaccattctttcagatagatactatttaatgaagcactttaagtttccctgctgaaccttttttaatgttttaaggagttcctcttcagtgacatttctgaggtgtttctaattctcggatactacaaccattatctggcatcacttctaacactaatatctggagagcaggagtttctcttgtacttcggtattctttggtagagtggatcaacacaattcc

SEQ ID NO: 96580 - DNA, 600 bp, Chicken  19866894946470_1
tttagattctactggaagtctgccattcaaattaataagattcttattcctcttctccttccattgcggggatatatttttgtcaccaattcaaagtttaaatgatgaaaattcatttggcttaatcatgtttttacttgaatctgggaagtcttctgataagtacataactacatgcgtaaattctggccaccaagaagtctttccatatggttactagcacttgtattggcaatggcacaggagataagacactcacaaggaaaacaaatgtaggttgggcaggagaaacgcggtttraaaattccttctagtattagccagtgcttctacattttttagaggatgtttaaaaacctgtctgcgtgaaagcttgtttttagataaaattactggaattttcataattcttctcacaaaatgaaaggtagaaaatttttttcatttctagaatacttatctagggagagctcttatatctaacgagctgcagtacactcagtagcagtgtgaattgtgtcactgcatcaagcctaagattatttgatgaggggattgagtgtaccctcagtaagtttgcagatgacaccaagttgggaa

SEQ ID NO: 96581 - DNA, 600 bp, Chicken  19866894946525_1
tctcaaaataataaaagtgacatccatctcaaaaaaaaaaaaaaaagaaagaaaagaagactgaatgaaaagattctgcttctatctagaggttattcagtgctctgctattgatacggcgtctattgaaagatttaaagatgaaaacgcagcgtattcaagtagtgatcgtttttcatcgtcacttagtggcagtgcagcctgcagtcaattgcagctgatttatcttttctgctattgattgggtgtggggctcaggcacctggctctgtctgtgctcaactgctgcaagaaatgcaraaggagaaggcaagggttgcgccaagcaatcttgttttcattctcaattgcttaatcacctcctttaagatgatgagataaactgctagaaggtaatttgcttatggacaccaggcatttcctgccaggaaaagggagcagcagacacacagtttccctgtgtagctcagtctacaaagtgttatgggaactgggttcaaggcaccaggtgtcaatgaagacttcaggtatcaaagggacagatcttttgcataaagttcctgcagcaattggacagatcaatacaatgggaaaggcatt

SEQ ID NO: 96582 - DNA, 599 bp, Chicken  19866894947275_1
  misc_feature (1)..(186): n is any nucleotide
nnnnnnnnnnnnnnnnnnnnnnnnnnnnnnnnnnnnnnnnnnnnnnnnnnnnnnnnnnnnnnnnnnnnnnnnnnnnnnnnnnnnnnnnnnnnnnnnnnnnnnnnnnnnnnnnnnnnnnnnnnnnnnnnnnnnnnnnnnnnnnnnnnnnnnnnnnnnnnnnnnnnnnnnnnnnnnnnnnnnnnnnnnccattatgtccatttcacgtatatagtttgtagaagtatctaagccataccaactaaccataccaaaacgtttaaagactcagtgattccgcctctatcgttttctcctattasgctcaagctcatgactacaagattaggatcgtttcccacatgcaaacagatgtgacaattcttttcaatggcaaaacagtcaccactttttttaatggcttacaactaagtgtgtcaggagcaccttgcctcatgcagcaggaataacattccatccatctccacaaccatcctgcatacttcaagcaatcacatctgatgaaatcgtaactgattgggtaataggagtttctgcaaaagccacctattaaagttattggcactgcattaattagactaattagatgtataaacttatc

SEQ ID NO: 96583 - DNA, 600 bp, Chicken  19866894947298_1
tgttcttaaagccataaggatggagtgctccttttacatcagtaagcgatgaccacatctgccatctactgtacaaagctggggacttctgtcttccctgtgagcttactgaggctgcatatttcaaaatctcttcccagcccatgcttctcctggaattatgaatgatgaaagcagggaacgcattgcagactggaaattaaacgtgaacaagtgagctctggatgagcagaggtaccttacccagacatactgaaaataccagattataaaaataccagattaacccaacaaccatcyttcttcccccagtcctgaaagaaaagattgctgccaaggtcattgattttgaattccgagttgaagaagctgcaactggaataacacccagcagctaaatgaaagcaggaacaaatgtcctgctcaacgttttcctcatgcaaggaaccaaatcccagtagcactcaggggccattattctctatgcactgagcaaccctgatgtgctgaaacactcatgagccagcagtgcttggcttttgccttactttgacagacttgataaacaactttgcttataacaagacagtggtaagatca

SEQ ID NO: 96584 - DNA, 600 bp, Chicken  19866894947320_1
tttaatgaagttagaacagtcattctcagctaagatgcctcacacaccagattttatctccctgtctctgcagacagaaatttaacaccagccattctttacgtggcactttgagtgctgggttcccctcctcccccacatacacttgcatcttcctccttacttctgtgatgagaggaacagtgattgatgcagtgggatgagcaggggtactgtaaatcagcaggaaggcacagagcagtgtagagagatgcaatgtaaactagccaagcaaagctttattttttgctgcatcatcayagagacaaatgacagtgtgtaaatgaaatggggagatataaagaaaatgaacttttttttttttctttttagaatatttgaagactaacattatttgggaggaacaatgaaatagtaggacatgcttaaaggcagatatagacttaagttggtctgaattttgttcgtaaaattgaagcacataggttaagagaagtcctgtgccttaagctggtaagatattataccacatcaataatctttgctgtgcattttattctttgttctcttttaattaggtaggaaagcatcgtgataagc

SEQ ID NO: 96585 - DNA, 600 bp, Chicken  19866894948066_1
gcataaaactttttctaatgctagagagtcacgtctttctcatctttgagcacaaatttaaacctatgctttctgccttcctcttagtatgcaacacattactacacaataatgataatgaaagcagatgtctggcattcaaaagactaacttttatgatatgtagcattatgaaatattacacaaagttgaataacctgttgtgacatctcccatttcagtcataatttatttcaacaactttcgtgcttttagttggcacaagcaagaaaggatgactggcatctgaggccccaaagytgtaaatttcctgtggctttcttcactaggattctrtgctacaatgcaacacaaactcgattttgcagctgaaggcctcattgagcttcatgccagcaaactgtctccctgtgaaaggaagagccacccatgtgtgtgcccagtactctgcaccgagggactacagagcacacttgaggaaggccccaatgtcccctaaaggagcagagaggtaggagaaattgaggtctcccctccacagtttggaacaatcgagaataggatagagccttctcagcactgagatactcagaggtgtag

SEQ ID NO: 96586 - DNA, 600 bp, Chicken  19866894948066_2
ttctcatctttgagcacaaatttaaacctatgctttctgccttcctcttagtatgcaacacattactacacaataatgataatgaaagcagatgtctggcattcaaaagactaacttttatgatatgtagcattatgaaatattacacaaagttgaataacctgttgtgacatctcccatttcagtcataatttatttcaacaactttcgtgcttttagttggcacaagcaagaaaggatgactggcatctgaggccccaaagytgtaaatttcctgtggctttcttcactaggattctrtgctacaatgcaacacaaactcgattttgcagctgaaggcctcattgagcttcatgccagcaaactgtctccctgtgaaaggaagagccacccatgtgtgtgcccagtactctgcaccgagggactacagagcacacttgaggaaggccccaatgtcccctaaaggagcagagaggtaggagaaattgaggtctcccctccacagtttggaacaatcgagaataggatagagccttctcagcactgagatactcagaggtgtagacaggcttgaaaacacacagactgatgtctctgtag

SEQ ID NO: 96587 - DNA, 600 bp, Chicken  19866894948122_1
ggaaaaaaatgtgaaaacacttataacggttctcatctctggctccagggggaccccatcctgcagagtgcatccactccctttgctatttgtacagcaaataggttaataggttccttgtaatataaaacagtaaggtcatgcctgtagaatgtgatcttcaagtaggatttaaaccacactttaaaaattgttataaaaatggaaaaattatctgtgacaacccttttcagcacttttctatcaaacattcattggaaatagctcttggaaacattactctgatttcctagaacagcycttgtcttcctctgctattggatttcaggtagaggaggattgcttatkctgcctgttacatgagtctagaagattaaaagactgggaactgcacaggcatttactaaaatcttaagaaaaacaagagctgaaatcaaagtttaatgttccagctgtctgcagattgaagaataaagtaaaaaatttaaatgagctcaccaaaaataatgaagtctggctaaaaaccatctgggcaagaagagagtttgaaatctggagttactcggagtactgagtctgattccagtaaagcttcagtat

SEQ ID NO: 96588 - DNA, 600 bp, Chicken  19866894948122_2
ggggaccccatcctgcagagtgcatccactccctttgctatttgtacagcaaataggttaataggttccttgtaatataaaacagtaaggtcatgcctgtagaatgtgatcttcaagtaggatttaaaccacactttaaaaattgttataaaaatggaaaaattatctgtgacaacccttttcagcacttttctatcaaacattcattggaaatagctcttggaaacattactctgatttcctagaacagcycttgtcttcctctgctattggatttcaggtagaggaggattgcttatkctgcctgttacatgagtctagaagattaaaagactgggaactgcacaggcatttactaaaatcttaagaaaaacaagagctgaaatcaaagtttaatgttccagctgtctgcagattgaagaataaagtaaaaaatttaaatgagctcaccaaaaataatgaagtctggctaaaaaccatctgggcaagaagagagtttgaaatctggagttactcggagtactgagtctgattccagtaaagcttcagtatgattccagcaaaaattcaattttcctgccgttgttttctctgggagct

SEQ ID NO: 96589 - DNA, 600 bp, Chicken  19866894948132_1
tatttatccagagctcattccagtttctaacgcagaagtcaagaccagcaaacaggtgagcacatcaaccgtagtccagagctttcaggaattttttgcttgcagaaaaatcctcaaatctgtcagaaaagtcccctcacctctaccagaaaccaacaaggctaaaatagctggatagactgaaataaatccatttattataccttttgaaacagcaggctaaattaactttttcaacccactaagaaatcacaaatgattttagggttattcaatctttatcaagtgttgaaagcatcwacagtatttgcaatacatacgagaaataccagaatagtttgtttggaaacgacctacaaagaccgtcgtatctgactgcctgaccttttcagggctagccaaaagttaaagcatgtcgctgagggcattgtccaaacggctcttgaacactggcaggcatggggcatcaaccatctctctaggaagagagtgtttctcttccagtgcttctctgtgctcacagtgaagttttccctgagaatagtgaatctgtggcatttacacgagcagagttactgcccgtaagggcactcggtctaa

SEQ ID NO: 96590 - DNA, 600 bp, Chicken  19866894948168_1
agcagggacaaacctttgctgcccagcttgggtggtaaaaattaaaaaacattgaagtcatttattaagtttgcataaattaccatatgagagagctcacgtcttagtcctacccccagtgacagagggaacagggttggtgcttaactcttctttcagcaagcctgctggtgatgctggggtgactgaataaacaggcgtttgcacaaccctctgcatcccacaaaacaaattaatgctggacgaggggaacttcagtcccagggaaggaagaggtaagagattctgtaatagtctccratcttcaaacataacacacttctaaccacgatcagccccgtccaaactccttaacctgactggcaagaaagccactccgtgaaaactaaaaagaataatatagtgcaattttagtacagtcttaaacatgagtcacttccttactagcagtgtgaacaatygaaaaatatacacagaagaggtgtgctcaaatgtaacgtaaggttgccgttttaataaagggattggcatagcagagatgtccattttagtaactccctttggttgacttcttcttcttctgttcctctctctgcttct

SEQ ID NO: 96591 - DNA, 547 bp, Chicken  19866894948168_2
agcctgctggtgatgctggggtgactgaataaacaggcgtttgcacaaccctctgcatcccacaaaacaaattaatgctggacgaggggaacttcagtcccagggaaggaagaggtaagagattctgtaatagtctccratcttcaaacataacacacttctaaccacgatcagccccgtccaaactccttaacctgactggcaagaaagccactccgtgaaaactaaaaagaataatatagtgcaattttagtacagtcttaaacatgagtcacttccttactagcagtgtgaacaatygaaaaatatacacagaagaggtgtgctcaaatgtaacgtaaggttgccgttttaataaagggattggcatagcagagatgtccattttagtaactccctttggttgacttcttcttcttctgttcctctctctgcttctgcttcctcctcttgctgccttctttgtatcctgaggaaacagggcttgtaaaacaccattcacagtatccatggccttttctatctatcaaaagcacacattctctga

SEQ ID NO: 96592 - DNA, 599 bp, Chicken  19866894948357_1
  misc_feature (1)..(46): n is any nucleotide
nnnnnnnnnnnnnnnnnnnnnnnnnnnnnnnnnnnnnnnnnnnnnnatggtgtactatatatggccatagaagtggttgatttaaagtcccccacatgggaatctcctatttttctctcttgactgttctgcctggaaagaaacacattggcatcaggtcatgttgcctctcctctgttttccacctatacgttcctacctttatactaactgaactacttcattctacttcattctctgtcacattcaaggtgcagtgcttaggatgatggccattctcaatcaattggattgtttcaycccctgtttcaaatgaataaatycagtttctccttttccctctgacattttgagtacagatcattggatagcacaaggacaatagctattgctgactttcacagcttagcacttaatcgcagctttgtccatcagttttaagtgtgctccctttccttcctagcaatcatacttatcgtagttggaaatgccaccctgaagttagaaccatctgctactcctaagcatcctcagctctgcagccttctgtttttaccctcatgtcagacctgagccaaggttcagatctgtcctagcag

SEQ ID NO: 96593 - DNA, 599 bp, Chicken  19866894948357_2
  misc_feature (1)..(23): n is any nucleotide
nnnnnnnnnnnnnnnnnnnnnnnatggtgtactatatatggccatagaagtggttgatttaaagtcccccacatgggaatctcctatttttctctcttgactgttctgcctggaaagaaacacattggcatcaggtcatgttgcctctcctctgttttccacctatacgttcctacctttatactaactgaactacttcattctacttcattctctgtcacattcaaggtgcagtgcttaggatgatggccattctcaatcaattggattgtttcaycccctgtttcaaatgaataaatycagtttctccttttccctctgacattttgagtacagatcattggatagcacaaggacaatagctattgctgactttcacagcttagcacttaatcgcagctttgtccatcagttttaagtgtgctccctttccttcctagcaatcatacttatcgtagttggaaatgccaccctgaagttagaaccatctgctactcctaagcatcctcagctctgcagccttctgtttttaccctcatgtcagacctgagccaaggttcagatctgtcctagcagactgcagtgatagcaatttggac

SEQ ID NO: 96594 - DNA, 600 bp, Chicken  19866894948389_1
atgtgagggttcagcctcccacagtaacgaacagtttctgcaagctgcagtgctttgtccctgatggaaacacccaacaccgctgagagcaaggtgccaggctctcttgatgtagttggtcactggaaccaaaacagaaagggtaacagcacccttattacacagaaattctgtatttttaattttagaccccagagaaactgcttaaagataagtaagctcttgggctctgcctgctgttgaaaggcacacacatacccttgcatatctctatcatattatttggtcatgggagaaaaygacctctctttggaaatctattcagctgtcaaatcaactcctttatctggtttcataccgctagctgagaagacaaggatccccctatcaacccaatttggtgttaactgatttagctttcatcagaatttttctctgaacttgggatcgacctgaaactcagacctttgggggctttccaaattgagtccaaaaatgttcacttggcaaaaaaaaaacaaaaaaaaaacaaaaaaaaaaaaacaaaacacaaaaaaaaaccatgcttggagatgtattcaaatatgcagaaatgtcccc

SEQ ID NO: 96595 - DNA, 599 bp, Chicken  19866894948683_1
  misc_feature (1)..(183): n is any nucleotide
nnnnnnnnnnnnnnnnnnnnnnnnnnnnnnnnnnnnnnnnnnnnnnnnnnnnnnnnnnnnnnnnnnnnnnnnnnnnnnnnnnnnnnnnnnnnnnnnnnnnnnnnnnnnnnnnnnnnnnnnnnnnnnnnnnnnnnnnnnnnnnnnnnnnnnnnnnnnnnnnnnnnnnnnnnnnnnnnnnnnnnncccaaaatgcccgtagtcccataaatccttctcacacactgggatgtgcctgcttctctttgcctctatttctgctaattacactcgatctcgttatccagcccctaaggaagcatrggggaactcagcccgacccaacgtgactgtaccatttgtgggaacaaacacaaactcggagggctaaaacacacagaaatgcattctaccaacggaacgaggaaaagagaaaaggcagaaagaaagaaaaatattacatggacagggcaaaaaaataataataaaaaagaacgtaagagaagagcatggctttgcagctaactggggaaaaccatacaaatcgaaaaaaaaatcatatatagccaccaaaaagagacaaaatgaaaaagagagaaagagagaaagaaaggaagaaagag

SEQ ID NO: 96596 - DNA, 526 bp, Chicken  19866894948740_1
tagtgtgatacaaaacatgaaaaatgtgctttgccttgctgctgtcagggtagttggatgagaagggtgatttgccagcttggctccctaccttccatgtgtaatctgccacgtgaaaagctgctggtagtgccaggatggtgctaagccatagtaggtcatttttcttccttgtcctattggcaggagaagcttttgcacaggaactgccgctttaaccttcagtttgcaagaacaaaagttgtagcctttagagagggaggaaaggggacctgttctcatctcgtgagggcagaaagytgcacctccaraaagcaaacagaaaattatgtaaatgctctgccatggttgtggccacttgctatctcaccagcttgtcttatctttctcctttttactttttcctatcactctttaacatgctagggaacgttctcatttctttctgagaatgggatgaggggaggcaaacaacagagcagaaaacatggtcacattctccatcaaatgagttttaggtgccaag

SEQ ID NO: 96597 - DNA, 515 bp, Chicken  19866894948740_2
aaaacatgaaaaatgtgctttgccttgctgctgtcagggtagttggatgagaagggtgatttgccagcttggctccctaccttccatgtgtaatctgccacgtgaaaagctgctggtagtgccaggatggtgctaagccatagtaggtcatttttcttccttgtcctattggcaggagaagcttttgcacaggaactgccgctttaaccttcagtttgcaagaacaaaagttgtagcctttagagagggaggaaaggggacctgttctcatctcgtgagggcagaaagytgcacctccaraaagcaaacagaaaattatgtaaatgctctgccatggttgtggccacttgctatctcaccagcttgtcttatctttctcctttttactttttcctatcactctttaacatgctagggaacgttctcatttctttctgagaatgggatgaggggaggcaaacaacagagcagaaaacatggtcacattctccatcaaatgagttttaggtgccaag

SEQ ID NO: 96598 - DNA, 599 bp, Chicken  19866894948999_1
  misc_feature (1)..(76): n is any nucleotide
nnnnnnnnnnnnnnnnnnnnnnnnnnnnnnnnnnnnnnnnnnnnnnnnnnnnnnnnnnnnnnnnnnnnnnnnnnnntggggaaaacaatgaagcagactccaaaagcaagagaaaactgcaaaaagatgaaaaccacaaaaggatgaaaaccagacaagggacaagggaaggaaaggagaaaaaggaaagtgatgatctggtttacagctctgatgtaaaccacagatctggtttacagctctgaatcaggaactgccttgtacagaaaaaagaaattttacttaaaacttttttttgckatatttcttttctgtggctgagacaaaatattctatcttttccctttgatcctacttagcctaaggtaggaactggmttttttyccgaaatgtctttcccacccttatcctgtcattattggagtattctgatttctccagagagaggacattggaagccattggtcccacattcttcttctatgataacttctactttttttcttcttgttatttgctcttgtatttagaatacactgcatattttgtattgttataaaatatctgacaaaagctagttatgtatagttctcatccta

SEQ ID NO: 96599 - DNA, 600 bp, Chicken  19866894948999_2
ggggaaaacaatgaagcagactccaaaagcaagagaaaactgcaaaaagatgaaaaccacaaaaggatgaaaaccagacaagggacaagggaaggaaaggagaaaaaggaaagtgatgatctggtttacagctctgatgtaaaccacagatctggtttacagctctgaatcaggaactgccttgtacagaaaaaagaaattttacttaaaacttttttttgckatatttcttttctgtggctgagacaaaatattctatcttttccctttgatcctacttagcctaaggtaggaactggmttttttyccgaaatgtctttcccacccttatcctgtcattattggagtattctgatttctccagagagaggacattggaagccattggtcccacattcttcttctatgataacttctactttttttcttcttgttatttgctcttgtatttagaatacactgcatattttgtattgttataaaatatctgacaaaagctagttatgtatagttctcatcctatttccttttgcagttctttgtctttaggaaggtattctgtaagcttttaattagtgaccaattatgtaatgttatagc

SEQ ID NO: 96600 - DNA, 600 bp, Chicken  19866894948999_3
acaatgaagcagactccaaaagcaagagaaaactgcaaaaagatgaaaaccacaaaaggatgaaaaccagacaagggacaagggaaggaaaggagaaaaaggaaagtgatgatctggtttacagctctgatgtaaaccacagatctggtttacagctctgaatcaggaactgccttgtacagaaaaaagaaattttacttaaaacttttttttgckatatttcttttctgtggctgagacaaaatattctatcttttccctttgatcctacttagcctaaggtaggaactggmttttttyccgaaatgtctttcccacccttatcctgtcattattggagtattctgatttctccagagagaggacattggaagccattggtcccacattcttcttctatgataacttctactttttttcttcttgttatttgctcttgtatttagaatacactgcatattttgtattgttataaaatatctgacaaaagctagttatgtatagttctcatcctatttccttttgcagttctttgtctttaggaaggtattctgtaagcttttaattagtgaccaattatgtaatgttatagctgcaatc

SEQ ID NO: 96601 - DNA, 600 bp, Chicken  19866894949161_1
ttttaacattattaatctcaatgatttacattctgaattaggtaaactacctaattgtgtaatacttgcacatacaacctgttcatcttttaaggaaacatttctgcccctctgagctttagtattgctcaaaatctcaaattctatcttggttttcattgcttgtgaagtaataatgaaacataaccccaaaaccaaggatgttgttccacttactgagccagcaacactccaaacagaaaatcaaaaataccttatttggacaacgtcaacttcaaaacactccgcatcattatgaamgtattaagaagaagaagaattagaatccattgtaatattccctgactaatattgcttcctgtactctggcccagatcttcaactaaatgagattatgccagctcatgtaagtcaaaggaattactctgatttatatcggttaaggaggacttggacattggagacagtgactgtatgtatttacagagaacgcttcatactgacagaaacagtcttgaatgacgagtgacataaaaattgggatcaagaaaaatcttactgtttacagaactctgttgggaaccaaaaaatctgcaatac

SEQ ID NO: 96602 - DNA, 599 bp, Chicken  19866894949473_1
  misc_feature (1)..(51): n is any nucleotide
nnnnnnnnnnnnnnnnnnnnnnnnnnnnnnnnnnnnnnnnnnnnnnnnnnnatgtgggcaaaaccagtccctgagcctcgctggtgtaagacttgtgtggtctcccctgagacccttcctgaaatgttcccagtgtcagggtgcagagctgtgccccacgcaggtggtgggacccactgggatgtactcacctgttcttcaccccacattgagggccagggctgcctcagtggccccagcaccaccatctgctcacagcccctacccaccagctacacatcatgacaaagagcatgcttygctcagaaatcagagaggggcttttgcagcaactgcccttggaacccagacaccaacatgggggtgagagagtggctggcgtgaagaaatccttccccatatccacagatgaggaaccccacaccaagcaagcagaaggtgtttcatctcatatctcctcaggatatccactcacccatgttcaccttccccaaggcacagctacctgctcgcaagccaactcacctgcccatgcaacagcactgggcactggtgggaggccaggtgggaggaacctggccagcactgaactgaactgg

SEQ ID NO: 96603 - DNA, 600 bp, Chicken  19866894949788_1
ttagcatgtttacttacaaggagctcattagctttcttgaacagaacagcttctgttctaatcactcactcacatctacttcggtagaatcaagctgtagtcacggtctgaatcataattttaacagttttagaaggactcattttttccaaagtagtgacttgccagaagataccacaaatatctatggagaaaataacatcatatctatgaactttcatcttgaaggtcaggaacttttaccctctgatgagtgcttccctgagcttcagcaagtttgggattaacagcaaaagtaakcaggattctattagccacatttctgttacaaaagcataacagatctgtaattctctatcctacacttcatactccaatttattgcaaagagttgtctgactggatgcataaacaacactcaaaagcttgtaatctcgattcagctttcactgttgttaaaaagaattattaaaaataaaagagctgctgttgttagaatacgaatagaaaacaaaacagatcagcatgtcaccactcacttcaatcctctcaaacactgtgcaagaatactgtataattaggaaagtatcagggtagaat

SEQ ID NO: 96604 - DNA, 599 bp, Chicken  19866894949990_1
  misc_feature (1)..(19): n is any nucleotide
nnnnnnnnnnnnnnnnnnntttgaatcactactttatctttcataatttgcatacaaagtattttctcttgatagtgctattccattgaacataatcactatgttgaatacaatgggattgtaatccatgttataaatgagaaatatttatcttcttctcttgccttcaggaaagacgaatgttagcagtattcagtaattccatttcatatttagggttttatttcacactgagaaatgcaatattgtactacgtcagccagccacctggggaaaagaggggaatttaaggaaaattaycatttcacacgcttgaactacttttgctttagaaatggtactggaaattttggtttgcaaggcagaaacaraaatgacaacaggtacacagatcccctccacgtggccagacaggttttttgaatggaagaatcatgggtttctccagaggtttctgtgtgaaaccctctatctgccctggyctgaatgctgaaccaagcaaagggacccggacacgagcacagcttggctgcaccagggtcagtacagactggcagcgtacaagtggagctcttcaactgctcctactcactacagtc

SEQ ID NO: 96605 - DNA, 600 bp, Chicken  19866894949990_2
atagtgctattccattgaacataatcactatgttgaatacaatgggattgtaatccatgttataaatgagaaatatttatcttcttctcttgccttcaggaaagacgaatgttagcagtattcagtaattccatttcatatttagggttttatttcacactgagaaatgcaatattgtactacgtcagccagccacctggggaaaagaggggaatttaaggaaaattaycatttcacacgcttgaactacttttgctttagaaatggtactggaaattttggtttgcaaggcagaaacaraaatgacaacaggtacacagatcccctccacgtggccagacaggttttttgaatggaagaatcatgggtttctccagaggtttctgtgtgaaaccctctatctgccctggyctgaatgctgaaccaagcaaagggacccggacacgagcacagcttggctgcaccagggtcagtacagactggcagcgtacaagtggagctcttcaactgctcctactcactacagtctacacgttggttgttttgtgagcaacttcttgtgtttggagttatgttatgaaaatgagatgtaagaatttt

SEQ ID NO: 96606 - DNA, 597 bp, Chicken  19866894949990_3
ttagcagtattcagtaattccatttcatatttagggttttatttcacactgagaaatgcaatattgtactacgtcagccagccacctggggaaaagaggggaatttaaggaaaattaycatttcacacgcttgaactacttttgctttagaaatggtactggaaattttggtttgcaaggcagaaacaraaatgacaacaggtacacagatcccctccacgtggccagacaggttttttgaatggaagaatcatgggtttctccagaggtttctgtgtgaaaccctctatctgccctggyctgaatgctgaaccaagcaaagggacccggacacgagcacagcttggctgcaccagggtcagtacagactggcagcgtacaagtggagctcttcaactgctcctactcactacagtctacacgttggttgttttgtgagcaacttcttgtgtttggagttatgttatgaaaatgagatgtaagaattttaatgccccatacattcgctgaaagtgagcaacttggacatttccagcgttctacaatttgatgcattggttaactctgtccatagccataacacacataacacagctg

SEQ ID NO: 96607 - DNA, 403 bp, Chicken  19866894950196_1
cgggaacagtgtgcccttgcaggacgctgagtggtactggggtgacatttcccggtaagggggtggctgacagctcctgctgtggatgcccaggctgtcgggctatgtaggggagctctggttgcacctcacaggctgtgacaatcgactctgtccccctcagggaggaagtgaacgagaagctgcgggacacaccagatggtaccttcctggtgcgtgatgcctccagcaagatccagggggagtacacgctcacactcaggtacggtgctggagccctctgagagcctccgctgcccyctttgctctcccctccctgctacaggaaaggaggcaataacaagctgatcaaaatctttcaccgggaagggaagtatggcttctcagagcccctgacttttgg

SEQ ID NO: 96608 - DNA, 457 bp, Chicken  19866894950964_1
attatggtgaaattatgcaactaagtaggttgttaacaagtggatttaaaattcataaatgagaggggaggataacggggtagagagtggcgggctcacgttaatttatattgtctgacgaggaatcagtgatgctggggatgagatggggcggaggattaaagggaattcattctgaaaacgagctgcaaagggcgcagatagcactgcactcagcctctgtcactgctgggctgcgtcccttcctccattcctgctccaatgagcatcgctcccaaactggttccaaagaaggggacrcgcacagaacccaattaaatacattccagctttgattgtggtcccggtgccatgtcagctcagccaagggtgcttgcagccattaatcaccagggctcaatttgtgctggcggactcatttagctcctgtgcagggctacgatgcttccaccatgtg

SEQ ID NO: 96609 - DNA, 555 bp, Chicken  19866894951458_1
acagactacattgcccacagccccaggcagtcactctcagcccctgtgcactgcagagggcgatggacacgtgcctggggagatgctgctctgctctgctgcagctctggctgcattcctatttgctgttcagaacccatcctgtctacagagcattacctaagtgcatgttcatgtttgcaggtgaaaagggaacaaaagagtaccacaaatttcagcaaagtaaatatctgctttcagaaagtaaagagactgaatgtacttgaagattctcaatagatggactcaaacactctacaycattaccctccactagaagtaggaagcagaaaacatggcggaaaatccctccttaagccttcacagtggaaagtccccagtagtgcagctccccgggcaggctgagtgctgagcctggcaggtggcagagtccctgccccagcatacaggccctggggcacagcagggaccctgctctgcaccacagccctgggcacccggctgcacccccggctgcacagcctgcagctgtcctggggcacgcagccctcaggg

SEQ ID NO: 96610 - DNA, 600 bp, Chicken  19866894953072_1
gcctagctaaagacagaccaatatatcaaattaaaaaatatgtaagtgcctggaaatattaatctggagtatttatcaattgcatgagtattctggatgatgcgcaagcccacgtggcctttcaggcctctcttccttgatgagttagaggcattgctcatggctaagtgcacaaccatcttttcttgtttttcttcttctgggaccatctggcttcttgggtaacctgccaggctgttggcatctgattcactgtagtttccatccagcatcatagtttttgaatgaggtatcccacaygtgcaaggaaactagaaacataagcgagaaatacagttgaaatttagaagaagacagagatagaagtggtgagtttattgcaacagacwgcttgtaaacagtaaagtttgaagtgtgagtttgaactgtcataatgcaaaatcactttgggaacaaatcatcacttcttttccttgtgttccaaaaggaagagatgtggtttagctgcactacttggcaagcagcttcagaaaagattagggaaagtaattttgcagatagatagaaaagtttagtgaaaggtcttagcttcactgtcca

SEQ ID NO: 96611 - DNA, 600 bp, Chicken  19866894953072_2
attctggatgatgcgcaagcccacgtggcctttcaggcctctcttccttgatgagttagaggcattgctcatggctaagtgcacaaccatcttttcttgtttttcttcttctgggaccatctggcttcttgggtaacctgccaggctgttggcatctgattcactgtagtttccatccagcatcatagtttttgaatgaggtatcccacaygtgcaaggaaactagaaacataagcgagaaatacagttgaaatttagaagaagacagagatagaagtggtgagtttattgcaacagacwgcttgtaaacagtaaagtttgaagtgtgagtttgaactgtcataatgcaaaatcactttgggaacaaatcatcacttcttttccttgtgttccaaaaggaagagatgtggtttagctgcactacttggcaagcagcttcagaaaagattagggaaagtaattttgcagatagatagaaaagtttagtgaaaggtcttagcttcactgtccaacttcactgtcttgagattcctagttacgcattcattgtgcttatcaccacccaagaacaagatatagtgttctgcagcaatgtcttat

SEQ ID NO: 96612 - DNA, 600 bp, Chicken  19866894957208_1
aacaggtaagtgattcaaagaggaaagaaaaatcacacatttctgaagcaggtaattatttaaaggagggcaaactaacttagcagtgggagtaacatgtgtgatacctggactttctataaagccttccagaaaaaactgggagatgtgtagaacagattaggggaagaagctgcaattcagtaggcagggcagtataagaagggattaacagtggcagaaagaatggaataaagatctgacatgatgaagggagctgccaagcttacagatacacagaaaattttcttatttgctgcwatatgactttgccaccctttcaaaatcccgtgtgctacctgttgagcagaatggaatatggctgcagaactgatacctgttctattaatttagaacagaactctcaattctgtattttcttgcaggagtaaatgagaagttttcaatatttaaatatttcagccaaagggaaggaaaacaacataaaatccatgaaactatttgaaggaaaaagcaggaatgaatgccctacctcgaggagtgttaatgaaaacatgcagcttttcgttgtaatacattgcttgttattagtgattaaaa

SEQ ID NO: 96613 - DNA, 600 bp, Chicken  19866894957513_1
taccaccaacaaaagtaggcagtacaacattaatgaaaatcagttgccaaagaaacagtaatgcaacataacagaaaatgaatgctaatattagacagaaagatgaacttctgacttgttttaaaaacaactgagaaaggagaaagatcacattttataatacaagtaattgggcgattcatatatccagagggtttttgtttgttggtttgtttgttttttaattatcacactgtgtgcatgtgtgcatgtgttttgtatttcctagtactggttaaaactctggattttatagaattktatagaattctgaggtaagaaatactgaatttttgagtaaagttataggttttttttggtatataaaccagcatgcccataattaactgcctaatttaaccaagacaaatatctgggatgacttgtattagaaagggtaaatataaatctgaaagctctgaaagctaacgagttttattttcagtattatctcacaacaaatttaaatcacaccccccttatgcagagaaaaatgctaacttcaaatcagttaatcagttagtaagtcttttttttttttttttaactatgaatgtgtaa

SEQ ID NO: 96614 - DNA, 600 bp, Chicken  19866894963269_1
gccccgctggtgctgcctctcgcatccaccggcagcgcgttccttctctctccttgccgcccggcgctttgccgtctcccagggctcgccaagtccaaatgttgcctgatggagtccaactccggcttgaccaacactcaccccatctgtccccgcaccagctggcttagggctccccagcactgctggctgtcggtgcctgctgtcgctcccagtcagcatggctctgttccttgcttttggggttccagagctgtttgctgtttgctacggttatggagtgtttctcttctctctctycttctcttccatcttggccgttggcgcctcggtggagttccggtgacccaaatgcagactgctctgcgttgaccaagtgtgatgccaagagaagaggcaggctccaaaacaggctgctggtgagtgctgtgcatgactcggggttcctagaatgcccactctttcttactaacccgtgttgttcagcaccaaatgygaaggctgcttctttccttccaggactggagactccaccaccaggtgccgttgtcattcttgacctccccgggttgcggcgctggacgtgccctgatccttgga

SEQ ID NO: 96615 - DNA, 600 bp, Chicken  19866894963269_2
tgcctgctgtcgctcccagtcagcatggctctgttccttgcttttggggttccagagctgtttgctgtttgctacggttatggagtgtttctcttctctctctycttctcttccatcttggccgttggcgcctcggtggagttccggtgacccaaatgcagactgctctgcgttgaccaagtgtgatgccaagagaagaggcaggctccaaaacaggctgctggtgagtgctgtgcatgactcggggttcctagaatgcccactctttcttactaacccgtgttgttcagcaccaaatgygaaggctgcttctttccttccaggactggagactccaccaccaggtgccgttgtcattcttgacctccccgggttgcggcgctggacgtgccctgatccttggaaaggggtaagagagctgtatttcattagcagcaggtgatctctacttaccttgtcttgtgtccaacaggtggcagtggagagttgtgacactccctgagcgctgcaaggactctactgaggctcttggtggacacagcaagaactcmcacccatagatggatgccaagatccgctccttcttctgtctggcaagct

SEQ ID NO: 96616 - DNA, 600 bp, Chicken  19866894963269_3
tagaatgcccactctttcttactaacccgtgttgttcagcaccaaatgygaaggctgcttctttccttccaggactggagactccaccaccaggtgccgttgtcattcttgacctccccgggttgcggcgctggacgtgccctgatccttggaaaggggtaagagagctgtatttcattagcagcaggtgatctctacttaccttgtcttgtgtccaacaggtggcagtggagagttgtgacactccctgagcgctgcaaggactctactgaggctcttggtggacacagcaagaactcmcacccatagatggatgccaagatccgctccttcttctgtctggcaagctctgctgacccctgaggtygttcccacgcttgcagaggttctatgggcttggtgtcgcttgttgcttgtgctcaccttgctgtcaccgcgtgttcttcctttgcccatctttaggggtcccccattctgacgggatctccgtgccttctgckgatcccagagagcatgsgtttgttctcttatagccaggttcagtatcattttttcatgttacgcattctttctcatccttcctctctttttttttttytt

SEQ ID NO: 96617 - DNA, 600 bp, Chicken  19866894963269_4
tccaggactggagactccaccaccaggtgccgttgtcattcttgacctccccgggttgcggcgctggacgtgccctgatccttggaaaggggtaagagagctgtatttcattagcagcaggtgatctctacttaccttgtcttgtgtccaacaggtggcagtggagagttgtgacactccctgagcgctgcaaggactctactgaggctcttggtggacacagcaagaactcmcacccatagatggatgccaagatccgctccttcttctgtctggcaagctctgctgacccctgaggtygttcccacgcttgcagaggttctatgggcttggtgtcgcttgttgcttgtgctcaccttgctgtcaccgcgtgttcttcctttgcccatctttaggggtcccccattctgacgggatctccgtgccttctgckgatcccagagagcatgsgtttgttctcttatagccaggttcagtatcattttttcatgttacgcattctttctcatccttcctctctttttttttttytttttttttttycccctccccaggctgccggttgatccgtcttgtgtctgcaataacccgaacgtagtc

SEQ ID NO: 96618 - DNA, 600 bp, Chicken  19866894963269_5
accttgtcttgtgtccaacaggtggcagtggagagttgtgacactccctgagcgctgcaaggactctactgaggctcttggtggacacagcaagaactcmcacccatagatggatgccaagatccgctccttcttctgtctggcaagctctgctgacccctgaggtygttcccacgcttgcagaggttctatgggcttggtgtcgcttgttgcttgtgctcaccttgctgtcaccgcgtgttcttcctttgcccatctttaggggtcccccattctgacgggatctccgtgccttctgckgatcccagagagcatgsgtttgttctcttatagccaggttcagtatcattttttcatgttacgcattctttctcatccttcctctctttttttttttytttttttttttycccctccccaggctgccggttgatccgtcttgtgtctgcaataacccgaacgtagtctagtaaggtttgctcaagtgagatggaaaatgaagaggtcggctccaaaacaagcttgtggtgagtgttttgtatgacttggggtttctagaacgacctctattttttttccataaaattgaagtgggcttgg

SEQ ID NO: 96619 - DNA, 600 bp, Chicken  19866894963269_6
acaggtggcagtggagagttgtgacactccctgagcgctgcaaggactctactgaggctcttggtggacacagcaagaactcmcacccatagatggatgccaagatccgctccttcttctgtctggcaagctctgctgacccctgaggtygttcccacgcttgcagaggttctatgggcttggtgtcgcttgttgcttgtgctcaccttgctgtcaccgcgtgttcttcctttgcccatctttaggggtcccccattctgacgggatctccgtgccttctgckgatcccagagagcatgsgtttgttctcttatagccaggttcagtatcattttttcatgttacgcattctttctcatccttcctctctttttttttttytttttttttttycccctccccaggctgccggttgatccgtcttgtgtctgcaataacccgaacgtagtctagtaaggtttgctcaagtgagatggaaaatgaagaggtcggctccaaaacaagcttgtggtgagtgttttgtatgacttggggtttctagaacgacctctattttttttccataaaattgaagtgggcttggtgtcggttgttccttac

SEQ ID NO: 96620 - DNA, 600 bp, Chicken  19866894963269_7
cmcacccatagatggatgccaagatccgctccttcttctgtctggcaagctctgctgacccctgaggtygttcccacgcttgcagaggttctatgggcttggtgtcgcttgttgcttgtgctcaccttgctgtcaccgcgtgttcttcctttgcccatctttaggggtcccccattctgacgggatctccgtgccttctgckgatcccagagagcatgsgtttgttctcttatagccaggttcagtatcattttttcatgttacgcattctttctcatccttcctctctttttttttttytttttttttttycccctccccaggctgccggttgatccgtcttgtgtctgcaataacccgaacgtagtctagtaaggtttgctcaagtgagatggaaaatgaagaggtcggctccaaaacaagcttgtggtgagtgttttgtatgacttggggtttctagaacgacctctattttttttccataaaattgaagtgggcttggtgtcggttgttccttacgctcactttgctgtcactgggtgttcttccttggcccatccttagggctccccagttctggtgggatctcagtgccgcctt

SEQ ID NO: 96621 - DNA, 600 bp, Chicken  19866894963269_8
atggatgccaagatccgctccttcttctgtctggcaagctctgctgacccctgaggtygttcccacgcttgcagaggttctatgggcttggtgtcgcttgttgcttgtgctcaccttgctgtcaccgcgtgttcttcctttgcccatctttaggggtcccccattctgacgggatctccgtgccttctgckgatcccagagagcatgsgtttgttctcttatagccaggttcagtatcattttttcatgttacgcattctttctcatccttcctctctttttttttttyttttttttttyycccctccccaggctgccggttgatccgtcttgtgtctgcaataacccgaacgtagtctagtaaggtttgctcaagtgagatggaaaatgaagaggtcggctccaaaacaagcttgtggtgagtgttttgtatgacttggggtttctagaacgacctctattttttttccataaaattgaagtgggcttggtgtcggttgttccttacgctcactttgctgtcactgggtgttcttccttggcccatccttagggctccccagttctggtgggatctcagtgccgccttccgatcccaca

SEQ ID NO: 96622 - DNA, 600 bp, Chicken  19866894963269_9
tggatgccaagatccgctccttcttctgtctggcaagctctgctgacccctgaggtygttcccacgcttgcagaggttctatgggcttggtgtcgcttgttgcttgtgctcaccttgctgtcaccgcgtgttcttcctttgcccatctttaggggtcccccattctgacgggatctccgtgccttctgckgatcccagagagcatgsgtttgttctcttatagccaggttcagtatcattttttcatgttacgcattctttctcatccttcctctctttttttttttytttttttttttycccctccccaggctgccggttgatccgtcttgtgtctgcaataacccgaacgtagtctagtaaggtttgctcaagtgagatggaaaatgaagaggtcggctccaaaacaagcttgtggtgagtgttttgtatgacttggggtttctagaacgacctctattttttttccataaaattgaagtgggcttggtgtcggttgttccttacgctcactttgctgtcactgggtgttcttccttggcccatccttagggctccccagttctggtgggatctcagtgccgccttccgatcccacag

SEQ ID NO: 96623 - DNA, 600 bp, Chicken  19866894963271_1
cgcagcagaggcatggacgtgtcctgtctgccgtgaggcacgacgggacgtggcgtatgcaacaccgtgcaaccatcagttctgcctcggctgcatccagcggtgggccatgctgaaaaccagctgcccgctctgcaggacagccatgaggaccatcaaggtctccgtgtggggagatgaacatcacgtcgagtgcgtcgtctccccacccgcagtgccgctccctgcccaattccaccacggcagcaccacccgccccagcggcactgcggcacacgctccatcctctgggccgctgcsgccacagcagagggctgcagggccacagaggagcgtgagagtgggcggcctcctgccgcaggagtgggcggcagcgttcagggagcgacgccacatcctcgaccccgtgctgcccggcctgcaccagaagctctccgccatccatgggatcccgtggtggcaggtcaggtccaccgagagcctgttcctgtgctgcctgtgtcagctggggctggacagggatgccatggcccggtgcatagagcccagcgtgggacccatcgccacgccaatcatcaactggctcactgacaccatcgt

SEQ ID NO: 96624 - DNA, 600 bp, Chicken  19866894963272_1
ccactggtttttgcggcgtttcagaggtgctccagagctccgaagcttctgcagcagcatcagaagcagcgtcaccaaggctgaggtctgctgccaccctgccagttccttccagtccagctacagcgtccttgccacaaggagatgctctggctgtattcgtacgagaaacacgaggcgttatcaaggtgcctgtctcatgggcttgctttgcttcatcacaggtttgcttaaacgagcccgcaacatcctgccgtttgaaccgcacagctagcagctctactttccttcccctgtccscaaaattgcatgcggtccacacccatgctctgtcagatcctttcacgggccgcatattcctatctgctgctgttctgtggttggcacggagttttactacctgtctaccagtcttgcagctgccactacagctactcgcttcctctgacacttacttccactgctggtagctcagcacgtgccaccttttcttagtacacaaaaactcacatcctaagaaagaaaacctcatttatagacctatccagattcagttatcaaacgctgatactcgaggcrcagccaaagtaaccgtaagca

SEQ ID NO: 96625 - DNA, 600 bp, Chicken  19866894963272_2
ctactttccttcccctgtccscaaaattgcatgcggtccacacccatgctctgtcagatcctttcacgggccgcatattcctatctgctgctgttctgtggttggcacggagttttactacctgtctaccagtcttgcagctgccactacagctactcgcttcctctgacacttacttccactgctggtagctcagcacgtgccaccttttcttagtacacaaaaactcacatcctaagaaagaaaacctcatttatagacctatccagattcagttatcaaacgctgatactcgaggcrcagccaaagtaaccgtaagcaagcacgttcactcttccgcacttgtgcctttaactatcaaaaccccggagctgtatttttcaaacagtgtacttttctaaaaaaatacacgtactaactcttccaattcaagtcaaccatctgcagaagcagcaaacgttcacagcggcagacagtttttccatgccccagtctttcaaagcatcttgcaaagctcagctccacacagtcaaaggagacgcagaagcctgagggtacgaaagcagtttcatgtgcttgtctggaggctctctacagtgc

SEQ ID NO: 96626 - DNA, 600 bp, Chicken  19866894963274_1
tgatgatctcaggtggcaggtctgcaactccactgcctagccttgaacgctgactgagcgtcctgggggtcccacgtgccagcagaacctgcgggcgctggtcctgtctgggaagcctgccgggtttccctgcagagctcgtggaaccagtggcagagtccatgtgaagagaggggcataggctgcgctgcagcaaaggccgggtctttcctggccggatgagacggggcgggatgggactgccgtgccatggtgatgcttgctgctgggagcaacgtggcctgcacagggggctcccgygcctgcctgcctgcctctcagcacctgtaaaacagggagcgggcctgagccacagtaggctagggggcaccggggatcttccaggcccacctggcctggctgcttcgtgacagaggctggtacraagcctggcttctcccagaggactggccctgcctgggaatgtgccaggctgaccctcaggggactcacgtgacttcaatgccgctacttgctgccaccatctccaccactgccagcgccggtcagaaccctacgggcacatgaacgtgacacggtgacaggacttgcggggcagcc

SEQ ID NO: 96627 - DNA, 600 bp, Chicken  19866894963274_2
tttccctgcagagctcgtggaaccagtggcagagtccatgtgaagagaggggcataggctgcgctgcagcaaaggccgggtctttcctggccggatgagacggggcgggatgggactgccgtgccatggtgatgcttgctgctgggagcaacgtggcctgcacagggggctcccgygcctgcctgcctgcctctcagcacctgtaaaacagggagcgggcctgagccacagtaggctagggggcaccggggatcttccaggcccacctggcctggctgcttcgtgacagaggctggtacraagcctggcttctcccagaggactggccctgcctgggaatgtgccaggctgaccctcaggggactcacgtgacttcaatgccgctacttgctgccaccatctccaccactgccagcgccggtcagaaccctacgggcacatgaacgtgacacggtgacaggacttgcggggcagccctatccccccaccccaaagccccgagtcccctagcctgacatgactcccatcctcaaatttccctacctgtcggcgccaggaagtggtgagcaaagacagcccagccaccaggagcaggaggct

SEQ ID NO: 96628 - DNA, 600 bp, Chicken  19866894963274_3
ctccctggcacaggcagagcgcttttgctggcttcaaaaagcccccagaagagcgtttcatcaaccccttttgcctcagatcccttccccagtgcagtcttaccttctctgaagctcttcttctcagagagagcttgctcttattgctaaaagtcaaggaataaggatagcagttctctgaagactagctagacttttattaaattatccttttaaaactctgaaagacctcagactgaaatagtgtgtgatacaaacaatgatcttagggctgaggttcagttctctgttggtatgttsacartgaatccataacgatgacagcagcgtctaggtgctggcaggtttcagttctgctgtctccttttctgcaggcttgaagctggccccggtgttggtcctgcagctgctccagsttccatccagactctgggaagagctggggagggtatacaacagtcagaaggcctcttggccctgctcttccaccagcatttcctctcctctgttggaaggatgttctcctgcacgatcgtgcctttcattggtggctgtgtgcaggaaggggttacaggaggttgctcttcagttgcactgcct

SEQ ID NO: 96629 - DNA, 600 bp, Chicken  19866894963274_4
ctggcacaggcagagcgcttttgctggcttcaaaaagcccccagaagagcgtttcatcaaccccttttgcctcagatcccttccccagtgcagtcttaccttctctgaagctcttcttctcagagagagcttgctcttattgctaaaagtcaaggaataaggatagcagttctctgaagactagctagacttttattaaattatccttttaaaactctgaaagacctcagactgaaatagtgtgtgatacaaacaatgatcttagggctgaggttcagttctctgttggtatgttsacartgaatccataacgatgacagcagcgtctaggtgctggcaggtttcagttctgctgtctccttttctgcaggcttgaagctggccccggtgttggtcctgcagctgctccagsttccatccagactctgggaagagctggggagggtatacaacagtcagaaggcctcttggccctgctcttccaccagcatttcctctcctctgttggaaggatgttctcctgcacgatcgtgcctttcattggtggctgtgtgcaggaaggggttacaggaggttgctcttcagttgcactgcctgact

SEQ ID NO: 96630 - DNA, 600 bp, Chicken  19866894963274_5
cttcttctcagagagagcttgctcttattgctaaaagtcaaggaataaggatagcagttctctgaagactagctagacttttattaaattatccttttaaaactctgaaagacctcagactgaaatagtgtgtgatacaaacaatgatcttagggctgaggttcagttctctgttggtatgttsacartgaatccataacgatgacagcagcgtctaggtgctggcaggtttcagttctgctgtctccttttctgcaggcttgaagctggccccggtgttggtcctgcagctgctccagsttccatccagactctgggaagagctggggagggtatacaacagtcagaaggcctcttggccctgctcttccaccagcatttcctctcctctgttggaaggatgttctcctgcacgatcgtgcctttcattggtggctgtgtgcaggaaggggttacaggaggttgctcttcagttgcactgcctgacttgtagcaatygttcgttcttagtcttgggccgcttcagggacaccaggagctgccggtacagcctttccatagcgagcctgtccgattgctctgtgcttctcttgtcactga

SEQ ID NO: 96631 - DNA, 600 bp, Chicken  19866894963274_6
acgatgacagcagcgtctaggtgctggcaggtttcagttctgctgtctccttttctgcaggcttgaagctggccccggtgttggtcctgcagctgctccagsttccatccagactctgggaagagctggggagggtatacaacagtcagaaggcctcttggccctgctcttccaccagcatttcctctcctctgttggaaggatgttctcctgcacgatcgtgcctttcattggtggctgtgtgcaggaaggggttacaggaggttgctcttcagttgcactgcctgacttgtagcaatygttcgttcttagtcttgggccgcttcagggacaccaggagctgccggtacagcctttccatagcgagcctgtccgattgctctgtgcttctcttgtcactgaagccagagttgaagggctggcaggtttcagtgctgctgtctgcttttctctcgaggctcaaagctggtccacgtgatggtcttgctgcagctcctgctttctcgtgccctttgggaagtgctggggggcgcatgggccaaataggcctcttggtcttgtattgccaccagcgtcttctctcctctgtttgaacgaggc
